United States Patent Application Publication US 2019/0352661 A1 - sequence listing, part 2

SEQ ID NO: 1460 - DNA, 1638 bp, Vigna unguiculata
ggcttttctgcttctgggatccttcaacagtgttagctgattcacaccattgttcttctctaattccaattattttcatcatcaaaggctctcatcattgctaagctcctgattcaaaaagagacccatgaacaacaaaccactttagactgcagctcagaagccaaggtgagactttttgagcaaagaaaactctcgttgttccatcatttgccatcttcaagcatatcaaatgccaagatcaaggggatctgatttgcctcaaaggcagtctccacgaggtcctcatcagcttcggacatcaagttctgactctgatccattgcatcatcggctgattgctgaccgaagtccgaagctcggagaccggcggtcaccaagaggtactcagtctgaggcactaaatcaaaagaagctaggaactcgcatcgcggatttggaatctcagcttggtcaagcacaagaagagttaaaagttttgaaggatcagctagtttctgctgaagctgcaaagaaagaagctcaagatgagctagtaaagaaagctgtgcaatcagtagttcctgtggttgagaagttccaagagaagtgcacttccaagaatgatcaagagtcaaacaaaactgaaaccaaaccccaagatattattataccagatgacaaccaacacgagactgatgtgtttgaagttccaattgagaagttgacaattaaatttgacaaacctgcagatcagtcagaaaaggaaactctggcgtttgaagactcaaatgcaccagcaatatcaatgaaggaaaagccttctgtggaggaacatgaactgtcactgaagattggtgaaattgcattgctgaaatccagtttggaagagaaagagaaggagttagagtccattactaatgagaaagaagatctgaagaagaaactggatgaagcagtttcaaaagtttcaactgctgaatccaaggaagaaggaatgtccttggtgttggaccgactaagagaagagttggaagcaagtaaaggcaatgcagagaagttgaatggaaagttaaaatgtgtggaagcagaaaaagaaggattagaagcagagatgaagaagctaagggtgcaaactgagcaatggagaaaagcagcagatgctgcagctgcagtgcttgctgggggtgttgatatgactgctagaattcctgaaaggtgtggttccatggataagcactttggtggaacgtttgagacacctggtggtaggtacagtggttatgtggggtctcctggtaatgctgatgacttggatgatggttttggaggtggaaagaggaagggttctgggattagaatgtttggtgatttatggaaaaagaagagtcaaaagtgatttctggtttatatccaatgagtgaatttactagtactttttaactaagctatgttttttatggtagcagaaactgcaaatacagttgcttactgctttgcagcttctgccatccctagtcatttctggtattatcaggccattaattgtgtagtgttaccgttgcatgatctgtgcaaggtagcagtcatttgaacttatgaacttttttgaacgcatgtttcacttctcctaagctttgatgaaggcacttttacttt

SEQ ID NO: 1461 - DNA, 2045 bp, Glycine max
tattaatcccaaaacactatgtcgctatttccatttccatttggttccttacaacactcacgaaaatcgattcaacacgaaaggaaaattgacgagttaccagacttgcattgaaatcgtatcaaacaatgtcgtagctgttttctttttcaaatcctgagttgttagtgagtgtgcccaacaatggcagctgttaggtcttcctctgtaagaaggttaggaagcacaattcagggttcttttaatatggaattagttcaacactgtcactatcaccatagtatgtgtatgaatcttgcaaggttgccaagtgattcactgagtcatccttattacaaaagagagctacagtttgctaagaatcggtttagtaatttggcctctgaatcccttggaagtagtcatcactttggcactagagccagtgtatcggtaaaaccaacattctctggttattgttttcgtagtgcccttccttttgcttccatgagccacgtgttgaatcatcgaatgtattcgtcgtcagtaggtgacaaaggaagtagagatggtggtacagaagtttctgctggttctggtgcaactgatattaataccactggtgattctgttgttgggggtgattgggctgagaggattaaagatgcctggaagagtgtggcagaggcagcatcatatgcagggggtaaggtcaaagaaacttctgatgatctcactccatttgctcaacagttgcttgattcacacccatatcttgataaggtggttattccagttgctggtactttaactgctaccatattagcttggttcttgctgcctaggattttgaggaaatttcacaaatatgcaacgcaaggtcctgtttctctattgccagcaagcgtgtctgtggagccagttccttatgagaaaagcttttggggtgctatggaggatccagtgcgatatttagttaccttcattgcattctcacaaattggtgttatggtggctccaacaactataacctcacaatatcttgcacctctttggaggggtgcagtgatagtttcatttgtatggtttttgcatagatggaaaacaaatatttttgcacggacgttgtccagtcaaagtttacttgggcttgataaggagaaagtgcttgctctagacaaaatctcatctattggtctatttgtgattggtataatggctttggctgaggcttgtggtgtggccgtgcaatctgttgtgaccgttggtggtataggaggtgtggctactgcttttgctgccaaggacattcttggcaatgtgttcagtggtttatctatgcagttttcaaagcccttttcaattggagatacaataaaagctggctcaatagagggtcaagtggtggaaatgggtcttacttccacatcattgctgagttcggagaagttcccagtcattgtgccaaactcatttttttctagtcaggttattgtgaacaagtcccgtgctgaatatcttgccattattaccaaaattccactgcaaactgaggatttaagtaagattcccccgatatcagatgatgtgaaaagcatgctcagatcaaatgcaaaggttttcttagggaaagatgttccctactgtttcttatcccgtatagaaagttcatatgcagaattgactcttggatacaacctcaaacatatgcgcaaagatgaattatactccgcagaacaagatattctcctacaggcagttcaaatcattaagaatcatggggttgctcttggcagcacatggcaagacacgtcttctaaatgatgtgctctgcgtgatggcaattttggaagtgattgcaaacatcgtgagctttagcttttactaatacaatgcccgcaaggttattaatttgtcattcgttcacacagaaaacagttttccagtactagtaaacagttttccagtactagtttgacatgtgtagttggttttagttttgatttactaaaagaatacaaaaaaaaattcattatgagtgaattgtggaattatccctttatgaa

SEQ ID NO: 1462 - DNA, 2048 bp, Phaseolus vulgaris
tttttctttgaattttttcatttatttattatttttttgggttgttgtctttctttccaaggcaagtaaaagaagattctgttcgttcctcaacggaaatcgattcagtgcgaagcgaaaattgacttgtttgttactgtattgattgaaattgtaccatacaatgccatcgctgtttactttcaaatgttgagttgttagtgtgctcaacaatggcagctgttagggcttcctctgttagacgaataggaagcacaatcaaggtttctttcaatatggaattagttcagcgctgtcactatcaccatagtgtgtgtgtgaaccttgcaaggttgccaagtgattcaccgagtcatccttattacaaaagagagttacagtctgctaagaatcagttcagtaatttggcttctgaatcatttggaagcagtcaccaatttggtactagagccaatttatcgtttaaacctgcattctctagctattgttttcggagtgcccttccttttgcttccgcgagccatgtgttgaatcgccgatcttattcgtcgacggtgggtggtgataaaggaagtagagatgctggtacagaagtcgctgctggttctggtgcgagtgacatgaatacgactggtgattctgttgttgggggtgattgggctgagaggattaaagatgctttgaagagtgtggtagagtcagcatcatatgctggggaaaaggttaaagcaacatctgatgatctcactccatatgctcagcagttgcttgattcacacccatatttagacaaggtggttattccagttggtggtactttaactgctactctaattgcttggttcttgatgcctatgattttgaggaaatttcacagatatgcaatgcaaggtcccgtttctctattgccagcaagcatatctggagatccagttccttatgagaaaagcttttggggtgccatggaggatcctatgcgatatttagttaccttcatggcattctcacaaattggtgtaatggtagctccaacaactataaccgcagaatatcttgcaccagtttggaggggtgcagtgatagtttcgtttgtatggtttttgcatagatggaaaacaaacgtttttgcccggacattaaccagtcaaagtttacttggacttgatagggagaaagtgctcgctctagacaaaatctcatctattggtctatttgtgattggtataatggcttttgctgaggcttgtggtgtggccgtgcaatctattgttactgttggtggtataggaggagtggctactgcttttgctgccaaggacattcttggcaacgtgtttagtggtttatctatgcagttttctaagcctttttcaattggagatacaataaaagcaggctcgatagagggtcaagtggtggaaatgggtcttactactacgtctttgctgagttcagagaagtttccagttattgttccaaactcatttttttctagccaggttattgtgaacaaatcccgtgctgaatatcgtgccattataagcaaaattcctctgcaaactgaggatttaagtaagattccccaaatttcagatgatgtaaaaagcatgctcagatcaaatgcaaaggttttcctagggaaagatgttccctactgtttcttatcccgtatagaaagttcatttgcagaattgactcttggatacaacctcaaacatatgcgcaaagatgaactatactcggctgaacaagaaattctgctgctggcagttcagatcattaaaaatcatggggttgctcttggcagcacatggcaagaaatgccttctaaatgatgtgctctgcaagaagacaattttggaagaaatggttgcaagacatgagctttagcttttactattgcaatgcttacaaggaatttgtcattcattcacactcaagcagttttctaatactatagtttgcccgtgtagttggttcatttgccttcaggttttaattttgatttactaaagaatgcaatttttctcgttgagtgaattctgcca

SEQ ID NO: 1463 - DNA, 2322 bp, Glycine max
cttccattctttataatctcttgcaaaaggaaattaatcctcaaggaaggacaaatggagctacataaatggcctttcttgctttgagattcactcataattctctaacaactccttccaaatccttgccactcgaagtaatcatcatatttaaccactacttgatctaaatttcctagtggggaattaatttcatttacatatatagtccaggtcccctcctccatttaaggcactgttgtttttcctaaggttatttctcaagcgatggatgttttgagtcttcaaaagttggtgaagacagcaccatctaaagcattgatcatcagaatcaacttggtctgtcttgccatctttctcgttgtttatgcgacccttcttctccgtccatcttcctctgtctatttcgagaatgcagcctcccttgtccggtgctccttgagcgagtgccatcacaagggagaaaaaagcacaacgatgaaagcagtgctggaggaaccacagctgaaatcaaggagggcaaagcagaacgcgactaagatagaggtgcctagcttctttggcgaaatggggaaaggaatgaagataggaatggtgaacatgcaagaagatgatgtgagtgaatggagcacctttggagaaacaagccaagtttattttgagagggtgtcacattttttcaattggacagatttatttcccgaatggatagatgaagaggaagagaccgatgttccatcgtgccccgagataccaatgccggaatttgcagcatatgaaggcatggacgtgatcgtggccaagttaccttgcaagtaccccgaagaaggatggggaagagacgttttaaggttacaagttcatctcattgtggcaaatttggcagtgaagaagggaaagagggattggaattggaagacaaaagtggttttgtggagtaagtgtaggccaatgctggagctgtttcggtgcaacgatttggttaagcaggaaaacgagtggtggtattatgaggttgatgtaaagaggttggagcagaaggtttctttgcctgttgggtcctgcaatttggctctgcctctgtgggaacaagggatcgacaaggtgtacgacacatcgaacctagaacaaagcgttcaaagcgaagcacgagcgaaacgtgaggcctatgtaacagtgcttcactcctcggaaggctacgtgtgcggcgcaataacattagcacaaaccctcctccaaaccggaaccaagcgcgacctggtgctcctcctagacagctccatctccgtcgcgaagcgccgcgccctcgaactctccggatggaagatccgactcatcacccggatccgaaacccgcgcgccgagaacggcacttacaacgaatataactacagcaagtttcggttatggcagctaacggattatgagagagtgatctttatcgatgccgacatcatcgtcctccgcaaccttgatattctcttccacttcccgcagatgtccgctacggggaatgaccagtccatcttcaactccggcatcatggtcctcgaaccctccaactgcaccttcgagattctcatgtcgcgtcgccacgacgtcgtctcctataacggtggcgatcaggggttcctgaacgagatcttcgtgtggtggcacaggcttccacggcgggtgaactacttaaagaacttctgggccaacacgacgatagaggcgggtaggaagaacgcaatgtttgcggcggagccgccgaagctctacgcgattcactacctagggctgaagccatggcattgttacaaggactacgactgcaactgggacgtgcaggatcagagggtgtacgcgagcgacgtcgcgcatcgacggtggtggaaggtgcacgatgccatggacgagaacttgcagaagctgtgtaggttgacgaggcaacgaaggatggagttgaactgggaaaggagaaaggctgggaagttagggttgccagatatgcattggaagatcaatgtcacggatcctagaagagctggctcaatgttgattggttaattaggttataattgttgtacaattataccatgcacattcttttttttttcttttatcttttgtaattttgatttggggttttttgtttttgttttaattcatgatttttttttacatacagagacatttgtggagaggtttaatctccatccagttatttatttgtgtgaatagggtagagcatatgatggttagccaatagccaattatggaaacgggaataataaaaagaaattcattacacttttagtcgatcttgattcttcaata

SEQ ID NO: 1464 - DNA, 2085 bp, Phaseolus vulgaris
tacatatatatagtgcaaaggtcccctccatttaagccactgttgttgctgctagagatatggaagtttcaagtcttcaaaagttggtgaagacagcaccatctaaagcattggtcatcagaatcaatctgttctgtcttgccatctttctggttgtttatgcagcccttcttctccaaccatcttcttctgtctactttgaaaatgcagcctcccttgttaggtgctccttgagggagtgccatcacaaggaagaaaaaggcttaaagatgaaaggggtgttggaggaaccagaggtgaagcagaggatgccaaagcagaatgcgagtaagatagaggtgcctagcttctttggtgaaatggggaaaggagtgaagatgggaatggtgaacatgcatgaagatgatgtgagtgaatggagcagccttggagaaacaacacaggtttatttcgaaagggtatcagagtttttcaattggacagatttgtttccggaatggatagatgaagaggaagagagtgatgttccatcatgccccgagataccaatgccagattttgcagcatatgaaaccatggatgtgatcatagccaagttgccttgcaagtaccctcaagaaggctggggaagagatgttttcaggttacaagttcatatgattgtggcgaatttggtggtgaagaaagggaagaaggattggaattggaagacaaaggtggttttgtggagcaagtgtaggccaatgatggagctgtttaggtgcaaggatttggttaagcaggaaaatgaatggtggtattatgaggttgatgtaaagtggttggagcagaaggtatctttgcctgttgggtcatgtaatttggctctgcctctgtgggaacaaggaatcgacaaggtgtacgacacgtcgaacctggaacagagcgttcagagcgaagctcgagcgaaacgcgaggcctacgcaacggttcttcactcgtcggaaggctacgtttgcggcgcaataatgctggcgcagacgctcctccgtaccggaaccaaacgcgacctggtgctcctcctcgacagctccatctccgccgtcaagcgccgcgccctcgagctctccggctggaagatccgagtcatcacccggatccggaacccgcgggccgagaacggcacctacaacgagtacaactacagcaagttccggttgtggcagctgacggagtacgagagggtgatcttcatcgacgccgacatcatcgtcctccgcagcctcgacatcctcttccatttcccccagttgtctgccaccggtaacgaccagtccattttcaactccggcatcatggttctcgaaccttccaactgcaccttcgatgttctcatgtcgcgccgccacgatgtcgtctcctacaacgggggagaccagggtttcctgaacgagatattcgtgtggtggcacaggcttccccggcgcgtgaactttctgaagaacttctgggcgaacacgacgctggaggcgagtgtgaagaacgcgatgttcggcgcggagcctccgaagctctacgcgatccactacctgggcctgaagccctggcactgttacagggactacgactgcaactgggacgtggaagatcagagggtctacgccagcgacgtcgcacaccgacggtggtggaaggttcacgactccatggatgagcggctgcagaggctctgccggttgacccgaaagagaaggacggagctcaactgggagaggcgaaaggcagggaagctagggttagcagacatgcactggaagatcaacgtgacagatccaagaagacaaggctcgcttttgatggattagggttatacgtataaattaggttataattgtacaattatacctccttttgtatttttcattctttcgttttttgttttttgtttttgttttcttcattatcatcttccctacagagacttgtgcagagtctttgtgtttttcagcagtttatttattagtcactcaataatggaaacatacattataacaaaataacattgcattgcacactccacatattttataaaacgtggactcattg

SEQ ID NO: 1465 - DNA, 1972 bp, Cajanus cajan
agtggggtattcatttacataaatagtccaggtcccctccatttgaggcactgttgcaacgttattgctcaggggatggaagttttgagtcttcaaaagttggtgaagacagcaccctctaaagcattggttatcagaatcaatttggtatgtcttgcaatctttctggttgtttatgcaacccttcttctccgtccatcttcttcagtgtatttcgagaatgcagcttcccttgttaggtgctccttgcgcgagtgccatcacaagggagaaaaaagcataaagatgaaagcagtattggaggaaccacaactgaaactacggatgccaaggcagaacgcgactaagattgaggtgcctagcttctttgttgaaatggggagaggaatgaagatgggaatggtgaacatgcatgaagatgatgtgagtgaatggagcaaccttggagaaacaacccacgtttatttcgaaagggtgtcacaatttttcaactggacagatttatttcccgaatggatagacgaggaagaagagagcgatgttccatcatgccccgagataccaatgccagaattcgcaacatatgaagacatggacgtgatcgtggccaagttgccatgcaaataccccgaagaaggctggggaagggacgttttcaggttacaagttcatcttattgcggcgaatttggcagtgaagaaagggaagaaggattggaattggaggttaaaagtggttttgtggagcaagtgtaggccaatgctggagttgtttcgatgcgatgacttggttaagcatgagggtgagtggtggtattatgaggctgatgtgaagagattggaacagaagatttctttgcctgtggggtcctgcaatttggctctgcctctatgggaacaagggatcgacacggtgtacgacacgtcgaacctggaagaaagcgtccgaagcgaagcgagagcaaaacgcgaggcctacgcgacggtgctccattcctcggaaggttacgtctgcggcgcaataacgctggcgcagacgctcctccaaagcggaaccaaacgcgacctagtcctcctcctcgacagctcctactccgccgcgaagcgccgcgcgctcgagctctccggctggcagatccgactcatcacccggatccgaaacccacgcgcggagaacggcacctacaacgagtataactacagcaagtttcgcttgtggcagctcaccgattaccacaaagtcatattcatagacgccgacatcatcgtcctccgcaacctcgacatcctcttccactttcctcagatgtccgccaccggcaacgaccaatccatctttaactccggcatcatggtccttgagccctccaactgcaccttcgatgttctcatggcgcgtcgctacgacgtcatctcctacaacggtggtgaccagggattcctgaacgagatgttcgtgtggtggcacaggcttccgcggcgagtgaacttcttgaagaacttctgggccaacacaacactggaggcgagtgtgaagaacgcgctgttcggcgcggagcctccgaaactgtacgcgattcactacctggggctgaagccctggcactgctacagggactacgactgcaactgggacgtagaggatcagagggtctacgccagcgacgtggcgcaccgacgctggtggaaggtccacgatgccatggaccaccgcttgcagagtctctgccgcttgaccagaaaccgaaggaccgagttgaactgggaaaggaggaaggctcgcaagttggccttacctgatatgcattggaacatcaatgttaccgaccccaggagatccggctctcttctcatggattagatcattaactaccttctttctagttataccacattctttttttttcttttttctaattttcatttggggtttttctttttctttcactttctcattttacttacacagatgc

SEQ ID NO: 1466 - DNA, 2551 bp, Phaseolus vulgaris
tggaaactaaatgagaataatacataaaatattagtcatactcttacactcctgaatacaaattaatatttggtaacaaaattaagatatattcaaagcataccaattaatagtgacaattgaggaacaaaatgatggttcagacttgttgtttgttttattaaagagagaaagtagggtcgaagagcacgtgtgcagtatgagagatcattgtagttgatcacactcaccctctcactgactcactcactgactcactcaccctccttgcctctctcccctccatggaactccgccgtcgatcctcctccaccgccgccaaggcctccgacgccctccccctccctcttcacctgaccaacgccttcttcttcaccctcttcttctccgtcgcctactacctcctcaaccgctggcgcgacaagatcacttcctcctcccccctccacctcctctccctctccgacatagccgccatcttcgcccttctcgcctccgtcatctacctcctcggcttcttcggcattcacttcgtccagtccttcgttgtccgtcctgccgacgacgacgaagaaccatcagaatgcacctccttcgataaagtcgacggtcaagaaaacgacgtcatgatggccgactcgataaccaagggagctgcacaaccttctccacttctatgcacggaaccagtgaaactggttgcgtgcggggtcgacaatgacatcatggtcgattctgtcacgaaggggaagagagtcatacaaccttcttttcaaaacgtgaaaccaatggtgaaagaattggtttcttccattgacagagtctatcatgacgaagacgacgtcttcattggctccgtcctaaacgggactgttccctcgtactcacttgaatcgcgtctcggggattgtcgcagggctgccgcgatccggcgagaggcgcttcaaaggactacgggacggtcgttgggaggactgcctctggaggggtttgattacgatgcaattctcgggcagtgctgtgagatgccggtggggtatgtgcaggttccggtgggagtggcggggccgctgctgctggatggggcggagtatacggtgccgatggcaacaacggaggggtgtctggtggcgagcacgaacagagggtgcaaggcgatctacgcgtccggtggggcgactagtgtgattctgagggatgggatgagtagggcgccggttgtgagattcgcgacggcaaaaagggctgcggagttgaagttctttatggaagatactctcaattttgataccttggccgtcgttttcaacaagtcaagtagatttggcaggcttcaaagcattaagtgctctattgcgggaaagaatgtttatcttagatttaccagtagtacgggtgatgccatgggaatgaacatggtttccaaaggggttcagaatgttcttgatttccttcaaagtgatttccctgatatggatgttattggcatctcgggaaattactgttcggacaagaaacctgcagcggtaaattggattgagggacgtgggaagtcagtagtttgtgaagcaactatcaaagaacatatagtgaaaaaggtgttgaagaccaatgtggcagctttggttgagcttaacatgctaaaaaatcttgctggctctgctgttgctggtgctcttggtggatacaatgctcatgccagcaacattgtttctgccatttttatatccactggtcaagatccggcacagaatgttgagagttcccattgcataaccatgatggaagctgtgaatgatgggcgagaccttcacatctcagtgaccatgccttcaatagaggtgggtacagtggggggtggaactcaactaccatctcaatctgcatgcttgaatcttcttggtgtgaagggtgcaagcaaggattcaccaggatcaaactcgaggcttttggccaccattgttgctggatctgttctggcaggggagctgtcgctgatgtctgctatagctgcagggcagttagtgaagagccacatgaaatacaacagatcaaatagagatatgtctacagtatcatccagacaagaaagttaaggagcatgtggttctagcctttactcgtgatgccaaaagtgaaaatgggactctttgatggtcaggatttgagagggaagtggaagacagcacttttctgtcacccatgtgaagtttcttggcttgtattgatgtctttgaatgtatcattaattgtacagtagaaagttttggtgagcccctctggaccattccttcactgtacaagtttggtagcctagttatcttctccaagaccttagatatttcttttgttgttatgtactaaaattctaaacaacaaatgttcagcattgtaccactttctcttaaacttctgtttctatgggggaccatgaacctgggtggtttcgtgcttttctcctgtcacgttgttcactagaaccaatcaattacattggaccatttattcaatataatttcccgtttcttttggtggatcttaaagatactct

SEQ ID NO: 1467 - DNA, 1485 bp, Panax ginseng
gtttaccaataaagaggtgaaatatcgtggaacagttagaatgcgaaagacgttttggtaacaagaaagtaatcttaaccgcccgatataggcgcgtgacactcacacgcattaatccaatggtcataaactgcaccagacgtacataaattttgcaggctcacatgggagaagaggcacctccaccgtttagttctctccctcattttacttgcatcactgattatttctccatctagctgttcatccactgctgctgctctttctataattgaggtgggtttgtggatcttttggtgatgggtttgttgattgattgattgtttgatctgggttcgctgcgtttttagagaattgaaaaaaaagaggggtgatggaggagaattggttgtgccagtggactgttattcgatccattcttgcaattgttcaatggtggggtttcaatgtcacagttattatcatgaacaaatggatctttcagaaactggactttaagttccctttatcagtctcatgtatacacttcatatgctcagctattggtgcttacttggttatcaaggttctgaagcttaaacctcttatcgtggttgagcctgaagatcgttggagaaggatatttcctatgtcatttgtgttttgtatcaacatagttttgggaaatgtgagcttacgttacattcctgtttcatttatgcaaaccataaagtcttttacgccagcaaccacagtgctattgcaatgggtagtttggagaaaatactttgactggcgaatttgggcatctttggttcccattgttgggggaatacttctcacttctattacagagcttagctttaacatgcttggattttgtgctgccttatttggctgtcttgctacttcgacaaaaactatccttgccgagtcactgctgcatggctacaagtttgacagcataaacacagtgtattacatggcaccttttgctactatgatcttggcgggaccagctctactactggaagggtctggggttttagaatggtttcgtacatgcccctctctattctcatccctcatcattatctttggctcaggagtgatggctttttgcctcaacttctctatcttttacgtgattcactccaccacagctgtcacgtttaatgttgctggaaatcttaaggttgctgttgctgttacatgttcctggctgatattcaggaatccaatctctgctatgaatgccgttggatgttcagtgacactcgtgggatgtacattttacgggtatgtgaggcacttgctctcccaacagctaccgggaactccccggacacctaggactccacggaatcgtattgagctgactcctctgataatcgataaattagatgataaggtttaatttagttagtcatacggttcggtcagttgggaaaatagtaataggactacagatttatcaaagaatgtgaaacactctggattctttgt

SEQ ID NO: 1468 - DNA, 1451 bp, Solanum phureja
tttgggaatcagaaatcacaaaagcgaattatgctttcagcttagctttcgcttcactgtctcctctctttcaatttgttgttgtagatcgatcttcgttgttgattgattgatgctatagagaaggagttagtgaaagagtaggcgtaatttattaaggaagagaaatggaggaaggcaggttgtgtcagtggactgtgattcgatccgtactcgccattcttcaatggtggggttttaatgtcactgttattatcatgaataagtggatctttcagaaaatggattttaagtttcctttgacagtgtcttgcatacactttatctgctcagctattggcgcatacacggtgattaaagtgctaaagcttaaacctcttattgtggttgaccctgaggatcgctggagaaggattttccccatgtcgttcgtgttttgtatcaacatagtgctgggcaatgtcagtctgcgctacatccctgtttcatttatgcaaacgataaagtcattcacccctgcaactacagttattttgcagtggctagtttggagcaagcactttgacttgaggatttgggcatctttgatacctattgttggaggaattctcctcacctccatcacagagctaagtttcaacacgtttggattttgtgctgccttatttggttgtctggctacatcgacaaagactatccttgcagagtctctactgcatggttacaaatttgacagcataaacacggtatattatatggcaccttttgccacaatgatcttggcgctaccagccttactactggaaggctctggagtagtggcatggctacagacggatcctccatttctttcatccttctgtattatttttggctctggtgtgttggctttctgcctcaatttctctatcttctacgtcattcactctaccactgcagtcacctttaatgttgctggaaaccttaaggttgccgttgctgtaacttgttcgtggcttatctttcgaaacccaatctcaatgatgaatgcagttggatgtgctataacacttgtcggatgtacattctatgggtacgtgaggcacatgctctcacaacaaacacccggcactccccgtacacctcgaacccccagaaaaagtatggagtttgtccctctagtaaacgagaagttagaggataaagtctaatgttgggtgtactcgaaacatgaactggctaaaagtttggtatagaagaaacgaaccgttcattgttgtctaattactgtttaggtaaatcgaattgagaatttcttatttaacttatttattttaccttcatcccctgctgctagatttggtttttattttgcctatagaagagaattacacagaaatgtttcatttcacttttgtctaatgtaccatttagatacttccgacaccaaatcttttatttgcctttcatcc

SEQ ID NO: 1469 - DNA, 1555 bp, Solanum lycopersicum
gtgtgatgtaaaattaccatcactacccttctccccttccccagtactttcaaaacaaacaaaatcacgcctctcttgtctgtgtttttttcatttttttttaaattactttgggaatcagaaatcacaaaaagcgaataatgctttcagcttagctttcgcttcactgtctctcctctctctttcagtttgttgtttgtagatcgatcttcgttgttgattgattgatgctatagagaaggagtttagtgaaagagtaggcgtaatttattaaggaagagatatggaggaaagcaggttgtgtcagtggactgtgattcgatctgtactcgccattcttcaatggtggggttttaatgtcactgttattatcatgaataagtggatctttcagaaaatggattttaagtttcctttgacagtgtcttgcatacactttatctgctcagctattggtgcatacacggtgattaaagtgctaaagcttaaacctctaattgtggttgaccctgaggatcgctggagaaggattttccccatgtctttcgtgttttgtatcaacatagtgctgggcaatgtcagcctgcgctacatccctgtttcatttatgcaaacgataaagtcattcacccctgctactacagttattttgcagtggctagtttggagcaagcactttgacttgcggatttgggcatctttgatacctattgttggaggaattctcctcacctccatcacagagctaagtttcaacacgtttggattttgtgctgccttatttggttgtctggctacatccacaaagactatccttgcagagtctctactgcatggttacaaatttgacagcataaacacggtatattatatggcaccttttgcgacaatgatcttggcgctaccagccttactattggaaggctctggggtagtggcatggctacagacggatcctccacttctttcatccttctttattatttttggctctggtgtgctggctttctgcctcaatttctctatcttctacgtcattcactctaccactgcagtcacctttaatgttgctggaaacctcaaggttgcagttgctgtaacttgttcatggcttatctttcgaaacccaatctcaatgatgaatgctgttggatgtgctataacacttgtgggatgtacattctatgggtacgtgaggcacatgctctcacaacaaacaccaggcactccccgaacaccacggacccccagaaaaagtatggagtttgtccctctagtaaacgagaaattagaggataaagtctaatgtcgggtgtactcgaaacatgaactggctaaaagtttggtatagaagaaacgaaccgttcattgttgtctaattactgtttaggtaaatcgaattcaggatcttttatttaacttatttattttaccttcatcccctgctccggattggcttagatttggtttttattttgccctatagaagagaattacacagaaatgtttcatttcacttttgtcgaatgtaccatttagatacttccgataccaa

SEQ ID NO: 1470 - DNA, 1246 bp, Olea europaea
attgtagtgaaatttgatctgggttggtgattgaatgatggaggagagtggattgtgtcactggagcgtaattagatctatattagccatcgttcaatggtggggtttcaacgttgctgttattatcatgaacaaatggatttttcagaaactggatttcaagtttcctttatctgtgtcatgtatacacttcatatgctcagcaattggcgcatacctagtaattaaagtgctgaaacttaagccacttattccagtcaaccctgaagatcattggaggaggatctttcccatgtcgtttgttttttgtatcaacatagttctggggaacgtgagcctgcgttatattcctgtttcttttatgcaaactataaagtcgttcacaccagcaacaacagttttcttgcagtggctagtttggggaaagtactttgattcccgaatttgggcttctttaattcccattgttggagggattctactaacatcaatcaccgagctcagttttaatacgtttggcttttgtgctgctttatttggctgccttgctacttctacaaagacaatccttgccgagtctctattacatgggtacaaatttgacagcataaatacagtctattacatggcaccttttgcgactatgatcttggcagtgccagccttgctattggaaggatcgggagtaatcgaatggtttcacacatgcccctccctgttttcgtcccttatcattattttcgggtctggggtcttagcattttgcttgaacttctccatcttttacgtcattcactctacaactgctgtcacctttaatgttgcaggaaatcttaaggttgctgttgctgttacatgttcatggctgatctttcgaaacccaatatcctatttgaatgctattggatgtgctataacgctcgttggctgtacattctacggctacgtgaggcacaagctctcgcaacaatcaccgggaacgcctttatcacctcgaactcctaggggtaagatggagttgattcctttagtaaatgaaaaattagacgataaagtttaaaaagtcttggtctggcatgaggttggcttgcagggaaaatgataatagcctattcacatagaaaaagaagagttatgttcaatgttttgtaatcaccaattaggtaaaattgaaaatctacccatttttcttccttacccccaaccccaccccaccacaatccagtgcaggcatatactactagtc

SEQ ID NO: 1471 - DNA, 1405 bp, Solanum melongena
tcaataggtcacaggggaattatgctttcagcttaactttcgcttcactgcttcctctcctctctttcaatttttgtttaatctgctgtgtagatcttcgttgttgattgattgatgctatagaggaaccagcgagcgagttagtgaaagagtaggcgtaatttaacggagagcaatggaggaaagcaggttgtgtcagtggactgtgattcgatccatacttgccattcttcaatggtggggttttaatgtcactgttattattatgaataagtggatctttcagaaaatggattttaagtttcctttgacagtgtcttccatacactttatctgctcagctattggtgcatacatggtgattaaagtgctaaagcttaaacctctcattgtggttgaccctgaggatcgctggagaaggattttccccatgtcattcgtgttttgtatcaacatagtgctgggcaatgtcagcctgcgctacatccctgtttcatttatgcaaacgataaagtcgttcacccctgcaactacagttattttgcagtggctagtttggagtaagcactttgacttgcggatttgggtgtctttgatacctattgttggaggaattctcctcacctccattacagagctaagtttcaacatgtttggattttgtgctgccttgtttggttgtctggctacatccacaaagactattcttgcagagtctctactgcatggttacaaatttgacagcataaacacggtatattatatggcgccttttgccacaatgatcttggcgctaccagccttactgctggaaggccctggagtaatggcatggttgcagacagatcctccacttctttcatccttctttattatttttggctctggtgtgctagccttttgcctcaatttctctatcttctacgtcattcactctaccacagcagtcacctttaatgttgctggaaaccttaaggttgcagttgctgtaacttgttcatggcttatctttcgcaatccaatctcactaatgaatgccgttggatgtgcaataacacttgtcggatgtacattctacgggtacgtgaggcacatgctctcacaacaaacaccaggcactccccgtacacctcggacccccagaaaaagtatggagtttgtccctctagtaaacgagaagttagaagataaagtttaatgccaggtgtacttgaaacatgaactagctaaaagtttggtatagaagaaatgaaccgttcattgttgtctaattactatttaggtaaatcaaattctgaatctcttatttaactcatttatttatgttcatcccctgctccgaattggctagatttggtttttgttttgcctagagaagagaattacacacatgaatgttttatct

SEQ ID NO: 1472 - DNA, 1546 bp, Nicotiana benthamiana
ccggggaacgaagggtgcgtgtcaagtactattactattactacctctcctgtccgagttctcaaatttttttttttttgaggaatcagaaattcgcaagcgaattatgctttcagcttagcttgcttcgcaatttccttcttccctcttttctctttttaaattatagtacaagatttggatttaggtttgtttttctagatcttcgttgctaattatatagggagaacgagttagtgaaagagcgcaagttagacaatggaggaaagcaggttgtgtcagtggagtgtgattcgatccgtattggctattcttcaatggtgggggtttaatgtcactgttattatcatgaataaatggatctttcagaaaatggattttaagtttcctttgacagtgtcttgcatacactttatttgctcagccattggtgcatacttggtgattaaagtgctaaagcttaaacctcttattgtggttgaccctgaggatcgctggagaaggattttccccatgtccttcgtgttttgtatcaacatagtgctgggcaatgtcagcctgcgctacatcccagtttcatttatgcaaacgataaagtcattcacccctgcaactacagtgattttacagtggctagtttggagcaagcactttgacatgcggatttgggcttctttgatacctattgttggaggaattctcctcacctccatcacagagctaagttttaacatgtttggattctgtgctgccttatttggttgtctggctacttccacaaagactattcttgcagagtctctactgcatggttacaaatttgacagcataaacacggtatattatatggctccttttgccacaatgatcttggcagtaccagctttactactggaaggccctggagtagtggcatggttgcagatgggtcccccacttatttcatccttctgcattatttttggctctggtgtgttggctttttgcctcaatttctctatcttctatgtcattcactcaaccacagcagtcacctttaatgtcgctggaaaccttaaggttgcagttgctgtaacttgttcatggcttatcttccgaaacccaatctcaatgatgaatgccgttggatgtgctataacgcttatcggatgtacattctatgggtatgtgaggcacatgctctcacaacaaactccaggcactccttgtacacctcggaccccaagaaaaagtatggagtttgtccctctagtaaacgagaagttagaggataaagtttaatgccagatgtgcttgaaacaggaactaggtaaaactttgatatagaagagaagtataaagaagaaacagatcgttcgttgtctaatttaccgtttaggtatatcgaattctgaatctcttatttaacttgtttatttaccttcatcccctgctatgaattagctagatttggtatttgtttttgcgtatagaaaagaagtatagagaaatgattctttgacattagtttaatgtaccatttaggtaattccgatgccaaatcttt

SEQ ID NO: 1473 - DNA, 1191 bp, Sesamum indicum
tttggtttctgtttgtttgatctctcttttcttggatttttactcggtaaagttcggatttttattgaaaattctgatctggggtggttggaaagttatggaggacggtagattgtgtcagtggactgtagttcgatccatactggctattcttcaatggtggggtttcaatgttacagtaatcatcatgaacaaatggatctttcagaaactggactttaagtatccattgtccgtgtcatgtattcactttatatcatcgtccatcggtgcatacttggtaattaaagtgctaaaactgaagccacttattacggtcgaccctgaagatcgctggaggaggatatttcccatgtcatttatattttgtattaatatagttctgggaaatgtgagcctgcggtatatacctgtttccttcatgcaaactatcaagtcctttactcctgcaacaactgttatcttgcagtggctaatctggaaaaagtactttgactggagaatttgggcttcgctgattcctattgttggagggattctactcacttctatcacagagctcagttttaacatgctcgggttttgtgctgctttatttggctgcctcgctacttccacaaaaactattcttgcagagtctctgttgcatggatacaaattcgatagtataaatacagtatattacatggcaccatttgcaactatgatcttggctgtgccagcattgctacttgaaggatcaggggttatggaatggatttatacatgcccctcgcttttcacgtctcttgtcatcatttttgggtctggagtgttggccttctgcctgaacttttcaatcttttatgtcattcactccaccactgctgtgacatttaatgttgcaggaaatcttaaggttgcagtagctgttacatgttcgtggctcatcttccgtaacccaatctccctgatgaacgctgttggatgtgctataacgcttgttggatgtaccttctatggatacgtaaggcacatgctctcacaccaaacgcctggaacccctcggactccaaggagcaagatggagctgatcccattaactaatgacaaattagacgacaaagtttgagttgtccatgaaatccgctagcagggaagtggccaaagatgtttgctgtagaaagaaaagagctattttcttttcttttt

SEQ ID NO: 1474 - DNA, 1527 bp, Nicotiana benthamiana
gaggaatcagaaattcacaagcgaattatgctttcagcttagcttgctttgcaatttccttcttccctctttttaaattatagtacaagatttggatttaggtttgtttttctagatcttcgttgttaattatatagggtgaacgaattagtgaaagagcgtaattgagacaatggaggaaagcaggttttgtcactggagtgtgattcgatccgtattggctattcttcaatggtgggggtttaatgtcactgttattatcatgaataaatggatctttcagaaaatggattttaagtttcccttgacagtatctagcatacactttatttgctcagccattggtgcatacttggtgattaaagttctaaagcttaaacctcttattgtggttgaccctgaggatcgctggagaaggattttccctatgtcattcgtgttttgtatcaacatagtgctgggcaatgtcagcctgcgctacatccctgtttcatttatgcaaacgataaagtcattcacccctgcaactacagttattttacagtggctagtttggagcaagcactttgacatgcggatttgggcttctttgatacctattgttggaggaattctcctcacctccatcacagagctaagttttaacatgtttggattttgtgctgccttatttggttgtctggctacttccacaaagactattcttgcagagtctctactgcatggttacaaatttgacagcataaacacggtatattatatggctccttttgccacaatgatcttggcggtaccagctttactactggaaggccctggagtagtggcatggttgcagaccggtccgccacttctttcatccttctgcattatttttggttctggtgtgttggctttttgcctcaatttctctatcttctatgtcattcactcaaccacagcagtcacctttaatgtcgctggaaaccttaaggttgcagttgctgtaacttgttcatggcttatcttccgaaacccaatctcaatgatgaatgccattggatgtggtataacgcttatcgggtgtacattctatgggtacgtgaggcacatgctctcacaacaaactccaggcactcctcggacacctcgtaccccaagaaaaagtatggagtttgtccctcttgtaaacgagaagttagaggataaagtttaatggcaggtgtgcttgaaacaggaactaggtaaaactttgatatagaagagaagtataaagaagaaacaaatcgttcattgttgtctaatttaccgtttaggtatatcaaattctgaatctctaatttaacttatttatttaccctcatcccctgctccgaattggctggatttggttttgtttttgcgtatggaagagaagcacacagaaatgattctcacttttgtctaatgtaccaattaggtatttccggtaccaaatcttttgttacctcattatctaccttaccttttatctccactccaagttggctagtatttgggttcatagtt

SEQ ID NO: 1475 - DNA, 1522 bp, Prunus persica
atggcgtgagagagttaaaaacgttttaggaactcccaacttaacaaaatggaaacagagggacaaatcacatggcactaacacacacaaactcaacgacagagagagagagagcttaacctcaattgcacaccgtttacgctctcattttcactttctcaattagggttctcttgtatctctgatctccaatctctcttttctttagctgctgtggcctgtaactctgtttttcctctgtttctgtaagaaaattcatctgggtcgcttttagttttcggaattgaggtgggtttttctgggtgtttgtgatctgggtctctttgagtgatctgggtctgagatggaggagactcggctgtgccagtggagcgtcattcgatctcttttggcaattcttcaatggtggggtttcaatgtcaccgtgattgttatgaacaagtggatctttcagaaactggattttaagtttcctctaacggtatcgtgtattcattttatatgctcggccattggagcatacacagtaatcaaaattttgaagcttaaaccactaataacagttgagcctgaagatcgatggagaaggatatttcccatgtcgtttgtattctgtattaacatagtgttggggaatgtgagcttacgttacattccagtttcttttatgcagacaataaagtcattcactcctgcgaccacagttgttttgcagtggctggtttggagaaagtactttgactggcgaatttggtgttctttgataccaattgttggaggaattcttcttacttctgttacagagcttagtttcaatatgttgggattttgtgctgccttgtttggttgtctggctacttccacaaagaccatccttgcagaatctctgttgcatggatacaagtttgacagcataaacacggtctactacatggcaccttttgcaaccatgatcttggctgtacctgcagtagtacttgaaggtaatggggttattgaatggcttcacactcatcagactcttgttccatccctcattattatattcagctctggggtgctggcattctgtctcaacttctccatcttttatgtgattcattccacgactgccgtaacattcaatgttgctggaaacctcaaggttgccgttgctgtccttgtttcatggatgatattcaaaaacccaattccagctttgaatgctgtcggatgtggaataacacttgtgggatgtacattctatgggtacgtgaggcacctgctctcccaacagctgcctggaactcctcgaacaccccggactccacggggtcggatggagctgcttccccttgtaaatgataaattagatgataaggtctaatgattcaaatcatgaatgaggttcctggcagttggaaaaacaatttataggaaacatcagtacacagaacttactattcatttctttgctatgtaatcctgcttcagattgcttcaaatttttaatatatggttttttgccccctgccaaactaaa

SEQ ID NO: 1476 - DNA, 1536 bp, Prunus mume
atggcgtgagatagttaaaaacgttttaggaactcccaacttaacaaaatggaaagagagggacaaatcacatggcactaacacacacaaactcaacgagagagagagagagagagcttaacctcaattgcacaacgtttacgctctcattttcactttctcaattaggtttctcttctatctctgatctccaatctctcttttctttagctgctgtggcctgtaactctgtttttcctctgtttctgtaagaaaattcatctgggtcgcttttagttttcggaattgaggtgggtttttctgggtgtttgtgatctgggtctctttgagtgatctgggtctgagatggaggagactcggctgtgccagtggagcgtcattcgatctcttttggcaattattcaatggtggggtttcaatgtcaccgtgattgttatgaacaagtggatctttcagaaactggattttaagtttcctctaacggtatcgtgtattcattttatatgctcggccattggagcatacacagtaatcaaaattttgaagcttaaaccactaataacagttgagcctgaagatcgatggagaaggatatttcccatgtcgtttgtattctgtattaacatagtgttggggaatgtgagcttacgttacattccagtttcttttatgcagacaataaagtcattcactcctgcgaccacagttgttttgcagtggctggtttggagaaagtactttgactggcgaatttggtgttctttgataccaattgttggaggaattcttcttacttctgttacagagcttagtttcaatatgttgggattttgtgctgccttgtttggttgtctggctacttccacaaagaccatccttgcagaatctctgttgcatggatacaagtttgacagcataaacacggtctactacatggcaccttttgcaaccatgatcttggctgtacctgcagtagtacttgaaggtaatggggttattgaatggcttcacactcatcagactctagttccatccctcatcattatattcagctctggggtgctggcattctgtctcaacttctccatcttttatgtgattcattccacgactgccgtaacattcaatgttgctggaaacctcaaggttgccgttgctgtccttgtttcatggatgatattcaaaaacccaattccagctttgaacgctgtcggatgtggaataacacttgtgggatgtacattctatgggtacgtgaggcacctgctctcccaacagctgcctggaactcctcgaacaccccggactccacggggtcggatggagctgcttccccttgtaaatgataaattagatgataaggtctaatgattcaaatcatgaatgaggttcctggcagttggaaaaacaatttataggaaacatcagtacacagaacttactattcatttctttgctatgtaatcctgcttcagattgcttcaaatttttaatatatggttttttgccccctgccaaactaaaaatatcttcagc

SEQ ID NO: 1477 - DNA, 1487 bp, Ricinus communis
aacaaatcccacatggaggaagagctgcctgctccgttacgccctccctcacattgttattgctattagggttttccctatttttaatcaaattctttccttttttcttgtttagtatttaatttctatctacaaatacagtttccattttcttgtctctttattatctagtacttgcctgttttgaattgggcactgaataggtaagctgagatagtgaaattgagttgaattatagagtttttgagatctgggttttctttatttttgaatatttttaagactgactgagtgaaacgatatagagtgatacaagatggaagagagtgtattgtgtcaatggagtgtattcagatctctactcgctattattcagtggtgggttttcaatgttactgtgattatcatgaacaagtggatcttccagaaattggatttcaagtttccactcacagtatcttgtgttcacttcatatgctcatcaattggagcatatcttgcaatcaaagtgctgaagctcaaaccattgatagtggttgaccctgaagatcgctggcgaagaatatttcccatgtcatttgtattttgtgtcaacatagtgttggggaatgtgagcttgcgatacattcctgtttctttcatgcaaacaattaagtcatttactcctgcaaccacagttgttttgcagtggttggtctggagaaaatactttgattggagaatttgggcttctttggtacctattgttggaggaatactcctcacttctgttactgagctcagctttaatatgtttggattctgtgctgccttatttggatgtttggctacttcaacaaagactatccttgcagaatctctgctacatggatataaatttgacagcataaacaccgtgtactatatggcaccttttgcaaccatgatcttaggagttccagcaatgctactcgaaggcagtggggttgtagattggttttacacccaccagtctgttgggtcttctctcatcatcattttcagttctggggtgttggccttctgtcttaacttctccatcttttacgtgattcattctacgactgcagttacatttaatgtcgctggtaaccttaaggttgcagttgctgtcttggtctcatggctgatcttccggaacccaatttcagctatgaatgccgttggatgtggtatcacacttgtcggatgtacattctatgggtatgtgaggcacttgcttgcccaacagccaccgccatcaggaactcctcgaactccccggactccaaggaacaggatggagttgcttccccttgtaaatgataaattagatgataaggtctgataaaagaggtgttgtgggaggttcttagtagttgatataggggttaatacgaatataaatgggggaaattggaaaaacagagcttcactcttgttgtgtgcacatccattagatcacccataaatttttaatatattttctt

SEQ ID NO: 1478 - DNA, 1516 bp, Malus domestica
agcatttccatgcgtgagagttcaaacgttttgggaacaccaacgtaacgaattaaaaacagaaggacaaatcacatgggactaaacacaacacacacacaagcgagagagaaagggcagcttaatctcaacaatttctcacacccgttacgctaattagggttcttaattccctgatcccccatctctccatagctcccataactctgttttccctctgtttctgcaacaaaacccatctgggtcggttttgtttctggaaattgtgaggtgggtgcgataggagtttttgtgggtgcgtttgtgatctggatctcttttaattgagtgatctgggtctgagatggaggagtcttggctgtgccagtggagcgtcattagatctctcctcgcaattcttcagtggtggggttttaatgtcaccgtaattgtcatgaacaagtggatctttcagaaactggattttaagtttcccctaacggtgtcatgcattcatttcatatgctcggccattggagcatacatcgtaatcaaggttttgaaacttaaaccactaataacagttgaccctgaagatcgctggagaagaatatttcccatgtcatttgtgttctgtattaacatagtgttgggcaatgtgagcttacgttacattccagtttcctttatgcagaccataaagtcgttcactcctgcaacaacagttgttttgcagtggctggtatggagaaagtactttgattggagaatttggtgttctttgatacccattgttggaggaattctacttacctctgctacagagcttagtttcaatatgtttggattttgtgctgccttatttggttgtctcgctacttccacaaagacgatccttgcagaatctcttttgcatggatacaaatttgacagcataaacacggtgtactacatggcaccttttgcgactatgatcttggctgtacctgcaatgctactcgaaggtaatggggttattgaatggcttcacacccatcagactcttgttccatccctcgtcatcattttcagctccggggtattggcgttttgtctcaacttctccatattttacgtgattcattctacaaccgccgtaacattcaatgttgctggaaacctcaaggtagctgttgccgtccttgtgtcatggatgatattcaaaaacccaattccagctttgaacgccgttggttgtggaataacgcttttgggatgtacattctatgggtacgtgaggcacctgatctcccaacagctgcctggaactcctcgaacgccacggactccacggggtcgtatggagctgcttcccctcgtaaatgataaattagatgacaaggtctagtggttcagtccacgtgattgagattgctgggagccggaaaatgatttataggaaacacaaagaacttactattcacttctagtctatgtaattctgcttcatatcacttgaatttttttttttaatatatggttttgtttttccacaacc

SEQ ID NO: 1479 - DNA, 1224 bp, Centaurea maculosa
ttaattaggttaaaaaaatttagtaagtttagtaagggtaagtttagggggttagttttggtagttctgagctgggttaattaatttaattgtaaaacccgatctgggtttgtttcattttcatttgatcatctgacgaacaaaaatggaggaaaccagattgtgttcatggaccgtctttcgatccatctttgccatctttcagtggtggagtttcaatgttgccgtcatcatcatgaacaaatggatctttcagaaacttgatttcaagttccctttgacggtatcatgtatacacttcatatgctcatcaattggggcatatgtagttatcaacgtactaaagcttaaaccacttattagtgttgaacctgaagatcggtggagaaggattttcccaatgtcgtttgtgttttgtatcaacatagttttggggaacgtcagcttacgttacattccagtttcgtttatgcaaacaatcaagtcattcaccccagcaacaactgtgatattgcagtggatggtatggagaaagtacttcgattggagaatttgggcatctctggttcctattgttggagggattctgcttacatctgttacggaacttagctttaacgtgcttggcttctgtgctgccttatttgggtgtcttgccacctctacaaagaccattcttgccgagtctttgcttcatggatataagtttgacagcataaacacggtgtactacatggcaccgtttgcgaccatgatattggcagtaccggcgttgcttctagaaggagccggagttttggaatggattcagacagctcccaatcttggctcatcgttcgtcatcattatcggctccggagtactggctttctgcctcaacttttccatattctacgtcatccattcaactactgccgtcactttcaatgttgccggaaatcttaaggtggcatttgcggttgcattctcgtggatgatattcaaaaacccgatatcggctatgaatgcacttgggtgtgcagtgacgcttgtgggatgcacgttctacgggtacgttagacacaagctaccaatccaactaccgggaactcctcgtacaccccggaccccacgttctcgcttggaaatggctccacttgtaaacgataaaatagacgataaagtttagttttgtgttattagaaatatatgttatattatttactacttactggagtcatgatg

SEQ ID NO: 1480 - DNA, 1076 bp, Capsicum annuum
taattattaagcaaagtagtagaaaaatatggaggaaagcaggttgtttcagtggagtgtgattcgatcggtacttgccattcttcaatggtggggttttaatgttactgttattatcatgaataaatggatcttccagaaaatggattttaagtttcctttgacggtgtcttgcatacactttatctgctcagctattggtgcatacgtggtgatcaaagtgctgaggcttaaacctcttatcgtggttgaccctgaggatcgctggagaaggattttccccatgtcgtttgtgttttgtatcaacatagtgctgggcaatgtcagcctgcgctacatccctgtttcatttatgcaaacgataaagtcattcacccctgcaactacagttattttgcagtggctagtttggagcaagcactttgacttgcggatttgggcgtctttgatacctattgttggaggaattctcctcacctccatcacagagctgagtttcaacgtgtttggattttgtgctgctttatttggttgtctggctacatccactaagactattcttgcagagtctctgctgcatggttacaaatttgacagcataaacacagtatattatatggcgccttttgccacaatgatcttggcggtaccagccttactactggaaggccctggaatagtgggatggttgcagacagatcccccacttctttcgtccttctttattatttttggttctggtgtgctggccttttgcctcaatttctctatcttctatgtcattcactctaccacagcagtcacctttaatgttgctggaaaccttaaggttgcagttgctgtaacttgttcgtggctcatctttcgaaacccaatctcaatgatgaatgccgttggatgtgcaataacacttatcggatgtacattctatggatacgtgaggcacatgctctcacaacaaacaccaggcactcctcgtacacctcggaccccaagaaaaagtatggagtttgtccctctagtaaacgacaagttagaggataaagtgtaatgccaggtgtacttgaaacatgaac

SEQ ID NO: 1481 - DNA, 1935 bp, Cajanus cajan
aaaaagtaaacttggaaaatgaaaccccacctatccggggctggggtctattttgtgtgctggtgctagttttgatggtgtggtgtggttgggagcataaaattaaaatcactatattctctctctctttctctctcacagtatgagttgtttataatttgaaaaaacgtgaaggcagccaacaaactaaggggttcttctaattcttggtagttcttctgttttgtatggacatgaagggatattcagtttcctggacaaaacataagaaagagccatattttgcagctcatcacagaagaagacaacaccaatgcatacaagcacatcatgatgccacagaagaaacaacttcaccaaatcattccttcaaattggctctttccacttcccaaaatactctactacctatgctacctgcccttgttgctttcctcctactccttacttcaattggcacagcattctctcaccccattgcttccaattcacctttgccagtactctctcaccacaatgctaaccacactttgagaccagctgcagtgttgcaaaagttcaggagaatcagagctcacctcaagaagatcaacaagcctgctgttaaaacaatcaagagtccagatggagatttgatagattgtgttttatctcatcagcaacctgcttttgaccatcctaacctcaaagggcaaagaccattggatccaccagaaaggccaaagggtcaccacaccaatggagaaactgccatagagagctttcagctttggactgattctggtgaagtgtgcccagaaggaactgttccaatcagaagaacaactgaacaggattttctacgagcaagctctatcagaagatttggaagaaaaccaagacgtggtgtacggagggactcaactggcactggtcatgagcatgcagttgtttctgtaaatggtgatcaatattatggagcaaaagcaagcataaacgtgtggacacctagcgtaaccgatccatatgagttcagtttatcacagatatgggttattgctggatcgtttggtaatgatctcaataccatagaagctggatggcaggtgagccctgagctatatggagacaactatcctaggttcttcacttattggacaacggatgcatatcaagcaacaggatgctacaacttactatgttcaggatttgtccaaactaacaacaggatagcaataggggcagcaatctccccaagatccatctataatggcagacaatttgatattggcttaatggtttggaaggacccaaagcatggacattggtggctggagtttggttcggggctactagttgggtactggccagcatacttgtttagtcacttgagaagccatgctagcatggtacaatttggaggggaaattgtgaattctcgttcaaggggctatcacactggcactcaaatgggaagtggccattttgcagaagaagggtttagaaaagcagcttattttagaaacttacaagttgttgattgggacaataatttgcttcctctgtcaaatattcaccaggtggctgaccattccaattgctatgacataagggtgggatcaaacaatgtttggggaacttacttttactatggaggtcctggaaggaatgtgagatgtccttgaagatatataatggctcctattatacatgcttctctgttaaaaatatatatattctttttttctcccactgtttcttttaattttcttttggggattttgctttcattacaagcttcacatgatttggctatatttgttaattttggttttggctaacaggttagagacagtttgttctgttattagagatgatgtaaatctacgaaagataagttgtcaatttataacattaaatcaaggggttttgtgttttctttacttttctttctcc

SEQ ID NO: 1482 - DNA, 2062 bp, Glycine max
ggagagagaggaataaaacaagaagaatccatgatgcaacatgcatcacatacaataaatcttggtaaagtttttattttttctgtgtttaattattccagtgtctgtctacagagtcctttgttgttttgagaggtaaaaggtaaacttggaaaatgcaaccccacctatctgtggcctgggtctattttgtgtgctggtgctagttttgatggtgtgggtgcataaaattaaaatcactactatattctctctctctctctctctctttctggttaggaccagtaagagttgttgttgtttataatttgaaaacgtcaaggcagccaacaaactaggggggttgttcttcatctgttttgtatggacatgaagaagggatattcagtttccttgacaaaacaacaacataagaaagagccattttttgcagttcatcacacaagaaaacaacaccaatgcatccaagcaaatcatgatgccacagaagaaacaagctcacagcaaaatcaatattccctcaaattggctctttcttccacttcccaaaatactactctactactgcctgcttttgttactttgctgctacttgttacctcaattggcacagcattctctcaccccaccattgtctccaattcttcttcacctttgccaccagcactctctcactccaatgctaataaccaaactttgagacctgctgcagtgctgcaaaagttgaggagaatcagaactcatctcgacaagatcaacaagcctgctgttaaaacaatcaagagtccagatggggatttgattgattgtgttttgtctcatcagcaacctgcgtttgatcatcctcagctcaaagggcaaagaccattggatccaccagaaaggccaaagggacacaccaatggagaaacagtcgtagagagctttcagctttggactgattctggtgaagcatgccctgaaggaactgttccaatcagaagaacaactgaacaagattttctacgagcaagctctgttagaagatttggaagaaaaccaagaaatgtacggagggactcaacaggcattggtcatgagcatgcagttgtttctgtaaatggagatcaatactttggagcaaaagcaagcataaacgtgtggacgcctagcgtaactgatccatacgaattcagtttgtcacagatatgggttattgctggatcgtttggtaatgatctaaataccatagaagctggatggcaggtaagccctgagctatatggagacaactatcctaggttcttcacttattggacaacggatgcatatcaagcaacaggatgctacaacttactatgttcaggatttgtccaaaccaacaacagaatagcaataggggctgcaatctcaccaagatccatctataatggcagacaatttgatattggattaatggtttggaaggacccaaagcatggacattggtggctggagtttgggtcggggctactagttgggtactggccagcatacttgttcagtcacttgagaaaccatgcaagcatggtgcaatttggaggggaaattgtgaattctcgttcaaggggctaccacactggcactcaaatgggtagtggccattttgctggagaagggtttagaaaagcagcatattttagaaacttacaagttgttgattgggacaataatttgcttcctctatcaaatattcaccagttggctgaccattccaattgctatgacataagggtgggatcaaacaatgtttggggaacttacttttattatggaggtcctggaaggaatgtgagatgtccatgaagatatatataatatattggctcctattataaataaataaatatattttttatttattttctcccactttttttttaaattttcttgtggggactttgctttcatcagaagcttcagagtttggctatatttgttaattttggcataattttgattttggctaacaggttagagacaatttgttctgttactaacatgatgtaaatctacgaaaaatatcttgtcagtttatagcatt

SEQ ID NO: 1483 - DNA, 1576 bp, Glycine max
aggaccagtagaagttgttttgtttataatttgaaaacgtcaaggcagccaacaaaacgagggggggttgttgttgttcttcttctgttttgtatggacatgaagggatattcagtttcctggacaaaacaacatcagaaagagctattttttgcagctcatcacacaacaagacaacaccaatgcatacaagcaaatcatgatgccacagaagaaacaagctcacagcaacaaaatcaatattccctgaaattggctctttcttccacttcccaaaatactatgctacatgcttttgttgctttgctgctacttgttacttcaattggcacagcattctctcaccccaccattgcctccaattcttcttcaactttgccagcagcactctctcacttccatgctaataacaacacattgagaccttctgcagtgttgcaaaagttgaggagaatcagagctcatctcaacaagagcaacaagcctgctgttaaaacaattaagagtccagatggggatttgattgattgtgttttgtctcatcagcaacctgcttttgaccatcctcaactcaaagggcaaagaccattggatccaccagaaaggccaaagggtcacactcacaccaatggagaaacagtcatagagagctttcagctttggactgattctggtgaagcatgcccagaaggaactgttccaatcagaagaacaactgaacaagattttctacgagcaagctccgttagaagatttggaagaaaaccaagaaatgtacggagggactccacaggcactggtcatgagcatgcagttgtttctgtaaatggagatcaatactatggagcaaaagcaagcataaacgtgtggacgcctagcgtaaccgatccatacgaattcagtttgtcacagatatgggttattgctggatcgtttggtaatgatctgaataccatagaagctggatggcaggtaagtcctgagctatatggagacaactatcctaggttcttcacttattggacaacggatgcatatcaagcaacaggatgctacaacttactatgttcaggatttgtccaaaccaacaacaggatagcaataggggctgcaatctcaccaagatccatctacaatggcagacaatttgatattggattaatggtttggaaggacccaaagcatggacattggtggctggagtttgggtcggggcttctagttgggtactggccagcatacttgtttagtcacttgagaaaccatgcaagcatggtgcaatttggaggggaaattgtgaattctcgttcaaggggctaccacactggcactcaaatgggtagtggccatttttcaggagaagggtttagaaaagcagcatattttagaaacttacaagttgttgattgggacaataacttgcttcctctatcaaatattcaccagttggctgaccattccaattgctatgacataaggatgggatcaaacagtgtttggggaacttacttttattatggaggtcctggaaggaatgtgagatgcccatgaattatatatatatatatatatataa

SEQ ID NO: 1484 - DNA, 1918 bp, Cicer arietinum
aaaaaaagtaaaacatggaaaatgcaaccccactcgtacagagtccgggtctattttgtgtgctggtagtacttgattttttcattgtgtaggagcaaaatattaaaaccactatactctctctctctctctctaagtcaggaccatttagaaagtttgtttataatttgataacaaacttggtaggcttcttcttggtaactatacttcttctgttttgtatggacatgaaaggatattattcagtttcttggacaaaaaaatatatgaaagactcatttttttcagctcaaaccacaaaaagacaacaccaatgcaaacaagaaaatcatgttgttgtctcagaaccaacaacaacttcactgaatcattccctcaatttggctgcttcttcccaaaacactctaccacctatgctactacatctctttgttactttgctcttgtttcttacctcaattagtccaattttgtcacacactattgtctcagattcacactctcatcccaatgctaaccaaacttttagaccaagtgttgcattgcataaattgaagagaatcagaactcacttgaagaagattaacaagcctgccatcaaaacaattaagagtccagatggcgatttaatagattgtattataactcatcaccaaccagcttttgaccatcctcaactacaaggacaaaaaccattggatccaccagaaagaccaaaaggatatcacaacaacaatggagaaaatgtaactcataattttcagctttggactgattctggtgaaatatgtcctgaaggaactattccaataagaagaactacagagcaagattttctaagagcaagttctattagaagatttggaagaaaaccaagaggtgtacgaagagattcaacaggcactggtcatgagcatgcagttgtatttgtaaatggagaacaatactatggagcaaaagcaagcataaatgtgtggaccccaagagtaacagatcaatatgaattcagcttgtcacaaatatgggttattgctggttcttttggtaatgatcttaatacaattgaagctggatggcaggtaagccctgagttatatggagacaattatcccagattcttcacttattggacaacggatgcatatcaagcaactggatgctacaatttactatgttcaggatttatccaaacaaataacaggatagcaataggggctgcaatttccccaagatccacctataatgaaagacaatttgatattggattaatggtttggaaagatccaaagcatggacattggtggctagaatttggatcagggcttctagttggatattggccagcaaatttgtttagtcatttgagaagtcatgcaagcatggtacaatttggtggagaaattgtgaattcacgttcaaggggatatcacactggcactcaaatgggaagtggtcatttttcaggagaaggttttagaaaagcagcttattttagaaacttacaagttgttgattgggataataacttacttcctttatctaatattcaccaattggctgaccattcaaattgctatgatataaaggagggaagaaataatgtttggggaacttacttttattatggaggtcctggaaggaatgttagatgtccatgaacaaattgttgctactaaaattatactcttctcttctttattataaatatatattctttttttactctcccaattttttttttttttttgggaattttggttttattacaagctttacttttgtgtttggctgtatttgttaattttgccatagttttgtttttttgctaacatgttagagacattttgttattagatatgatgtgtatctatgaacaacatattgtctatttataacattgaatagggggtgatgtgtt

SEQ ID NO: 1485 - DNA, 1992 bp, Medicago truncatula
atgattagatgcttctcacaaccctttggaagggtaaattaaagtaatacttggaaaatgcaaccccacctgtgcacagggtctattttgtgtgctggtagtacttaagtttttcatggtgtgggtgcaaaatattaaaaccattatattctctctctctccctctctctagtgaggaccagttagaaaagaagggttgtttatagtttgaaaacaaacttggtaggctttcttcttggcattgttcttctgttttgtatggatatgaaaggatattattcagtttcttggacaaacaaatatatgaaagactcatttttttcatttcaactcacaagaagacaacaccaatgcaaacaagaaaatcatgttgtctcagaacaaacaactacttcactaaatcattccctcaaattgtcttcttctacttccctaaatactctatcacctattctacatctttttgttactttgcttctgttttttacctcaattagtccaattttgtcacaccccattgtctcaaattcaacttcatcacaagtacaatctcactccaaggctaaccaaacttttagaccagatgttgcattgcataaattgaagagaatcagagctcatttgaagaaaatcaacaagcttcccgtcaagacaattaagagtccagatggagatttgatagattgtattatatctcatcaacaaccagcttttgaccatccactactcaaaggacaaaaaccattggatccaccagaaaggccaaaagggtacaacaagaatggagaaaatgcaacaaataactttcagctttggattgattctggtgaagaatgtcctaaaggaactgttccaatcagaagaacaacagaacaagattttcttagagcaagctccataagaagatttggaagaaaaccaagaggtgtacggagagactcaacaggcaatggtcatgagcatgcagttgtttttgtaaatggagaacaatactatggagcaaaagcaagcataaatgtgtggacaccaagggtaactgatcaatatgaattcagcttatcacaaatatgggttattgctggatcatttggtaatgatcttaatacattagaagctggatggcaggtaagtcctgagttatatggtgataattatccaagattctttacttattggacaacggatgcatatcaagcaactggatgttacaatttactatgttctggatttattcaaacaaacaatagaatagcaataggggcagcaatctccccaagatcgttctatagtggaagacaatttgatattggcttaatgatttggaaagacccaaaacatggacattggtggcttgaatttggatcagggctattagttggatattggccagcaaacttgtttagtcacttgagaagtcatgcaagcatggtacaatttggaggtgaaattgtgaattcacgttcaagaggctaccacactggcacacaaatgggaagtgggcatttttcaggagaaggttttagaaaagcagcttattttagaaacttacaagtagttgattgggacaataacttgcttcctttatcaaatattcaccaattggctgatcattcaaattgctatgatgtaaaagagggaagaaataatgtttggggaacttatttttattatggaggtcctggaaggaatgtgagatgtccatgaacaaaattattggtactaaaaactacattcttctcttctatgttataaatatatattcttttttactcccacttttttttttcttttgggaatttttggtattttattactagcttcatatggtttggctgtatttgttaattttgccataattttgtttttttgctaacatgttagagacagtttgttattaaggatgatgtgtatctaagaaaaaacatgttctttgtttcttcctccttcctacttactatgtacttctcaacttgactattgttttttctacga

SEQ ID NO: 1486 - DNA, 1509 bp, Glycine max
cgtagtggttgggtttgaggatgagtttcagggaagagagtggcgatgcgagggatcttcagaaaccgttcctccacacggggagttggtacaagatgggttccaggcagtccagcatcatgggatcctccactcatgtcatccgcgacggcgccgtctccgtcctcttctgcgtcctcatcgtcgcattgggtcccatccaattcggcttcacgtgtgggtattcttctccaacccaaggggctatagttcgtgatctaaacctctctatttcggagttttctttctttggatcattgtctaacgtgggagcgatggtaggagctatagctagtggtcagatagctgaatacatcgggcgcaaagggtcattgatgattgctgcgattcccaatataatagggtggcttgctatttcttttgccaaagattcctcgtttttgtatatggggaggttgttggaaggttttggcgttgggattatctcttatgtggtgcctgtttatatagctgagattgcacctcaacacttgagaggtggccttggatcagtgaaccagctctctattactattggcattatgctggcttatcttttgggcctttttgtcaactggagagtgcttgcaattctaggaattttgccctgtacagtattaatacctggattatttttcatacctgaatcccccagatggttggctaagatggggatgacagatgagtttgagacttctttgcaagtgttacgaggatttgacacagatatatctgttgaagtatatgaaattaagagatctgtggcttcaacgggaaaaagagctacaatccgatttgcagatctcaagaggaaaagatattggttccccttaatggttggtattggattacttgttcttcagcagttatctggtatcaatggagttttgttctattcaactaccatctttgcaaatgcaggaatttcgtccagcgaagctgctactgttggacttggtgccgttcaggtcatagcaactggaatttccacgtggttggtggacaaaagtggtcggaggctgcttctaatgatatcctcatctgtaatgactgttagccttctcattgtttcaatagcattttatctggagggggttgtatctgaggattcacatctattcagcatgttgggaatagtttctgttgttggacttgtggttatggtcattgggttctctcttggtctgggacccatcccttggcttataatgtctgagatacttccagtgaatataaagggccttgctggcagcatagcgacaatgggaaattggctgatttcgtgggtgatcacgatgaccgctaacttacttttgaattggaacagtggagggacatttacaatctacacagtggtagctgcctttactattgcttttatagcattatgggttcctgagaccaagggaagaacattggaagaaattcagttttccttcagatagatgttttgggagagagcacacatgt

SEQ ID NO: 1487 - DNA, 1982 bp, Cajanus cajan
actcccacaccgccccagcaccacacgttacatgttttaaaaaagaccaaacccttcataaatcaatcataattctctgactcatggaccaaattaactaagcaccaacgtgacctttccaatctcgcaccgcaagcgacaacactcctcacagcccagcacagcacgttaaaaatcgaaaccctctttgggacatttttacgaacaccttccagtaagagtttgttactttttttttttctcaagtgtgaggatgagtttcagggaagagagcggagatgcgagggatcttcagaagcccttcctccacaccggaagttggtacaagatgggttcacggcagtccagtatcatgggatcctccactcaggttatccgcgacggcgccgtttcggtcctcttctgcgttctcatcgtcgccttggggccaattcaattcggcttcacgtgtgggtattcttctccgacgcaagaggcaattgtccgtgatctaaagctctcggtttcggagttctctttgtttggatctttgtcgaatgtgggagcgatggtgggagctatagctagtggtcagatagctgaatatgttgggcgcaaagggtccttgatgattgcttcgattcccaatattatagggtggcttgctatttctttcgccaaagactcctcatttttgtttatggggaggttgttggaaggttttggcgttgggattatctcttacgtggtgcctgtttatatagctgagattgcacctcagaacttgagaggtggccttggatcagtcaatcagctctctgttactattggcattttgctggcttatctgttgggcctttttgtcaactggagagtgcttgcaattctaggaattttgccctgtacagtattaatacctggattatttttcataccagaatcccccagatggttggccaagatggggatgacagatgagtttgagacttctttgcaagtgttgcgaggatttgacacagatatatcagttgaagtacatgaaattaagagatctgtggcttcaactggaaaaagagctgcaatccgatttgctgatctccagaggaaaagatattggtttcctttaatggttggtattggattacttgtctttcagcaattatctggtatcaatggagttttattctattcaactaccatctttgcaaatgcaggaatttcatctagcaatgttgctacagtgggactaggagccattcaggtcatagcaactggaattgccacatggttggtggacaaaagtggccggaggttgcttctaattatatcctcatctataatgacagttagccttctcattgtttcagtagcattctatctggagggggtagtgtcagaggattcacatctatacagcattatgggaatactttctgttgttggacttgtggttatggtgattggattctctctaggacttggacccatcccttggcttataatgtctgagatacttccagtgaatataaagggccttgctggcagtatagcgacaatgggaaattggctgatttcttgggtggttacgatgaccgccaacttgcttttgaattggagcagtggaggaacatttacaatctacacagtagtagctgcctttagtgttgcttttgtatctttatgggtccctgagaccaagggaagaacattggaagaaattcagttttccttccgatagatatgttttgggagagcacacaggtagtctaccatgtttaaactaaaatgatgagtccaatatcatgtgttttatagtcctttgttttatcgtgtatcaaattttctgtaacaaatgaagtggagaaaaatcagtgcatgtgcatcgtgttgttttttttgtacaaactacggatataattattctttttaagaatattttgtcgcaaaggaatgagaaaaataaaataaaatctagtcatagtgtagctgttttaatcgagttt

SEQ ID NO: 1488 - DNA, 2088 bp, Phaseolus vulgaris
gtaagtaggagcaaaaatccaaaacaacagcgcgattgagatcaccacgtcactcaccagatattttgaaaccaccaaagcaaacccaaggcaaaccagagcaacactccactttgcccttccttcataaatcaatcataattccctgtttggtggaccgaattcacagttttaattaagcatcgaaacgtgacgcttctagtctctcactaacatcacaagcgacactactcgtcacagctcagcacagcaaagcagcgttccaaatcctcaccccacgtgggacattttcgcaaacatcttgtacctgcgagtataatttgtttcaggtttcgagagccactggttggaagtggttggttggattttgaggatgagtttcagggaagagggtggagatgcaagggatcttcagaaaccgtttctccacacggggagttggtacaagatgggttcgaggcagtccagcatcatgggatcctctactcaggtcatccgcgatggcgctgtctctgtcctcttctgcgtcctcatcgtcgctttgggtcctatccaattcggcttcacatgtgggtattcttctccaacgcaaggggctatagtacgcgatctaaagctctcagtttcggagttctctttgtttggatctttgtcgaatgtgggagcgatggtgggggctatagcaagtggtcagatagctgaatacatagggcgcaaagggtcgttgatgattgctgcaattcccaatataatagggtggctttctatttcttttgccaaagattcctcgtttttgtttatggggaggttgttggaaggtttcggcgttgggatcatctcttatgtggttcctgtatatatagctgagattgctcctcaaaacatgagaggtagccttggatcagtgaaccagctctctgttacaattggcattctgctggcttatctgttgggcctttttgtcaactggagagtgcttgcaattttaggagttttgccttgtacagtattaatacctgggttatttttcataccagaatcccccagatggttggccaagatggggatgacagatgagtttgagacttctttgcaagtattaagaggatttgacaccgacatatctgtggaagtttatgaaattaagagatctgtggcttcaacaggaaaaagagctgcaatccgatttgcagatctcaagaggaaaagatattggtttcccttaatggttggtattggattacttgttcttcagcaattatctggcatcaatggagttttgttctattcaactaccatctttgcaaacgcaggaatttcgtcaagcgatgctgctacagttggacttggtgccattcaggtcatagcaactggaatttccacgtggctggtggacaaaagtggtcggaggctgcttttaataatttcatcgtgtataatgacagttagccttgtcattgtttcaacagcattctatctagagggggttgtatcagaggattcacatctaatcagcattttaggaacactttctgctgttggacttgtggttatggtgattgggttctctctaggtcttggacccatcccttggctgataatgtctgagatacttcctgtgaatataaaggggcttgctggcagtatagcaacaatgggaaattggctgattgcgtgggtggtcacgatgacagctaacatacttttaaattggagcagtggagggacatttacaatctacgcagtaatagctgccatgactattgcttttatagcgaaatttgtcccagagaccaagggaagaacattggaagaaattcagttttccttcagatagatatgttttgggagagcacacaggtagtctgtctcgtttaaacttaaatgaggagtccgatatcatgtgttttttaggtctttgtatttattatgtatcaaattttgtgtaacaaatgaacggggtgaaaaatctgtgcaagtgttcctttactgtacaagctactgataatttttttaaaataatattgtagcaaaagaatgagggaaaaaccttcctagtcatagtgtatttcctattacgaattgtgt

SEQ ID NO: 1489 - DNA, 2469 bp, Cicer arietinum
gtactatgactatcctatggtacggacatatcttccttgaaagaaaaaaagaaccacagcatccaccggtcatacacctcaccgaaccacacaaaccacattgacattgcagtaaatgggatagttcatgctttccctcgcttctacccttttagcatatcattcatattccatattaagcacaaaacataaccccgtcaattatggtactccacaattcacatcacacgctaaattccaaatatgtcagtaaaatagtagaaatagaaatcacgatcacgagtacacactgccacaattacaccacaagatgataagaaccgcgaacccaacaacccttccagaattattattattattattattttaatttcactactctctaacaacgttatatctcatgcttttaagcgacactttaacacacctcaccatcacgttacaaaaccctcttttctttcagacattttcgcaaacaccttatagatattgaaataataaaaccgtttctccacaacttagaaggagaggggaaaggatgagtttcagggaagatagcggagatggaagggaccttcaaaaaccgttccttcatacgggaagttggtataaaatgggttccagacaatcgagtgttatggggtccaccactcaggttattcgcgatggttctgtttccgttctcttttgcgtcctcatcgctgctttgggtcccattcaatttggtttcacgtgtggatattcttctccgacgcaacaagctataatcaaagatctgaatctcacggtttcagagttttctctgtttggatctttatccaatgtgggtgccatggtgggagctattgccagtggtcagatagcagaatacataggacgcaaagggtcattgatgattgctgcaattcccaatataatagggtggctagccatttcttttgccaaagactcctcctttttgtttatggggaggttgttggaaggttttggcgttgggattatctcttatgtggtgcctgtttatatagctgagatagcacctgagaacatgagaggtagccttggatcagtgaaccagctctctgttacaattggaataatgctggcttatctgttgggcctttttgccaactggagagtgcttgcaattctagggattctgccttgtacagtattaatacctggattatttttcataccagaatctcctcgatggttggccaagatggggatgatggatgagtttgagacttcgttgcaagtgttgaggggatttgacactgatatatctgttgaagtacatgaaatcaagagagctgtggcatcaaatggaaaaagagttacaatcaggtttgcagatctcaagaggaaaagatattggttccctttaatggtaggaattggattacttgtacttcagcaattgagtggtatcaatggagttttgttctattcaactagcatctttgcaaatgcaggaatttcgtccagcaatgctgctaccgttggacttggagctattcaggtcattgctactggaatcgctacttggttggtagacaaaagtggtcgaaggatgctcctaataatatcctcatctttaatgacagctagccttctcgttgtttctatagcattctatctcgagggagttgtatcaaaggattctccatatttcagcattttgggaataatatccgttgttggccttgtggttatggtaattgggttctctctaggacttggaccaatcccttggctcataatgtctgagatacttccggtgaatataaagggacttgctggtagtatagcaaccatggctaactggctagttgcgtggatcatcacaatgactgcgaacttgcttttgacttggagcagtggagggacattcacaatctacacaatcgtagccgctttcaccgttgcatttacatcaatgtgggtacctgagactaagggaagaacattggaagaaattcagttttctttaagataaagtatgttttgggagagcataccagtagtctctcatgtttaaatgaaatgatgttgtatgatatcatgtatttttagtcttgtgtattgattatgttttctgtagcaaatgtaagaagggaaacatcagtgcatctcttatttattttattttactgtacaagctgctgtggaaaaaagatatatgataataaaataatgagaaagaaacttgttttgtagtcataagatagcctcacaaattaccgagttcatttctatttcaagttacactctgcatttgctattgggaagaaggaaattgtttgatgtgcccatagtagatatggggtcactccaagtgagtaagtaccaaattaagagatagcatcgattaaaaaaagaacgagtttgagttggtatgattgttttttttgttgttgctgctggatgtatgattatatatatattgagacaatatgtttacat

SEQ ID NO: 1490 - DNA, 1745 bp, Lotus japonicus
atgagtttcagggaagagagtggcgaaggtagaggagaccttcagaaaccgtttctccacacgggaagctggtacaagatgggttcacgccaatccagcgtcatgggttccaccacccaggtcatgcgtgatggctccgtctccgtcctcttctgcgtcctcatcgccgccttgggtcctattcaattcggcttcacctgtgggtattcttctccgacgcaagatgctattgtcagcgatctgaagctctcgctttctgagttttctttgtttggatctttatcgaatgtgggagcgatggtgggagctatagcgagtggtcagatagcagaatacgtcgggcgaaaagggtcattgatgattgctgcaattcccaatataatagggtggctcgccatttctttcgcgaaggactactcgtttttgtatatggggaggttgttggaaggatttggcgttgggattatttcttatgtggtgcctgtgtatatagccgagatagcacctgaaaacttgaggggtggccttggatcggtgaaccagctctctgttacaattggaatattgcttgcttatctgttgggcctttttgtcaactggagagtgcttgcaattttaggaattttgccttgtacaatattaatacctggattatttttcataccagaatctcctagatggttggccaaaatgggaatgacagaggagtttgagtcttctttgcaagtgttacgaggatttgacacagatatttctgttgaagtacatgaaatcaagagatctatagtaccacgaggcagaagagttgcaattcggtttgcagatctccaaaggaaaagatattggttcccgttaatggtaggaattggattacttgtacttcagcaattgagtggtatcaatggagttttgttctattctactagcatctttgcaaatgcaggaatttcatccagcagtgctgctactgttggacttggagctattcaggtcattgcaactggaatctccacttggttggtggacaaaagtggtcggaggctgcttctattactatcctcgtctataatgacagttagccttgtcgttgtttctatagcattctatctggagggtaccgtatcagaagattcacacctatacaaaattttgggaatagtttctgttgttggccttgtggttatggtaattggattttctctaggacttggaccaatcccttgggttataatgtctgagatacttccagtgagtataaagggccttgctggcagtacagccaccatggctaattggttgacttcatgggcgatcacaatgactgcaaacctgcttttaacttggagcagtggagggacattcacaatgtacacagttgtagctgcctttaccgttgttttcacggcattgtgggtccctgagaccaaaggaagaacattagaagaaattcaatcttccttcagatagatatgttctcttgtttaaactgaaatgttgtggtctatatcatgtatttttgtagtcctgtgtattcattcatcttgtatcaagttttctgtaaaaaagagaaagaaagcatattgtagcaaaagattgagggggaataaacttgtcttctagtcatagtatagccatttaaatcccacattgtaagagttcatttctgtgtatggacttgcattctgctcggctattttgaaggtgttgtattttatttaattaattaattatctgttttaaagttg

SEQ ID NO: 1491 - DNA, 1624 bp, Medicago truncatula
tcacgttccaaaaatcttctctgagacattttcacaaacaccttttgggttaagaagatgagtttcagagaagagagtggtgatggaagggatcttcagaaaccgtttcttcatacgggtagttggtataaaatgggttcaagacaatctagtgttatgggttcaactacttctgttatgcgggattcagtttcggttctattttgtgttcttattgctgctttgggtccaattcaatttggcttcacgtgtggatattcttctccgacgcaacaagctataatcaatgatctcaagctctctgtttcagagttttctctgtttggatctttatccaatgtgggtgctatggtgggagctatagcaagtggtcagatagcagaatatgtcgggcgcaaagggtcattgatgattgcttcgattcccaatataatagggtggctcgccatttcttttgccaaagactcttcctttttgtttatggggagactgttggaaggttttggcgttgggattatctcttatgtggtgcctgtttatattgctgagatagcacctgagaacatgagaggtagccttggatcggtgaatcagctctctgttacaatcggaataatgcttgcttatctgttgggcctatttgccaactggagggtgcttgcaatcctaggaattttgccttgtacagtattaatacccggattgtttttcataccagaatctcctagatggttggccaagatggggatgatggaggagtttgagacttcattgcaagtgttaaggggattcgacacagatatatctgttgaagtacatgaaattaagaaagctgtggcatcaaatggaaaaagagctacaatccggtttgcagatctccaaaggaaaagatattggtttcctttatcggtaggaattggattacttgtacttcagcaattgagtggtatcaatggagttttgttctattcaactagcatctttgcaaatgcaggaatttcatccagcaatgctgctaccgttggacttggagcaattcaggtcatagctactggagtagctacttggttggtggacaaaagtgggcggagggtgctcctaataatatcctcgtctttaatgacagccagccttctcgttgtatccatagcattctatctggagggagttgtagaaaaggattcacaatatttcagcattttgggaataatatctgttgttggccttgtggttatggtaattgggttctctctaggacttggaccaatcccttggcttataatgtctgagatacttccagtgaatataaagggtcttgctggcagtacagcaaccatggctaattggctagtagcgtggatcatcacaatgactgcaaacttgcttttgacttggagcagtggagggacattcttaatctacacagtggtagctgcttttactgttgtatttacgtcactatgggtgcctgagaccaagggaagaacattggaagaaatacagttttccttaagatagagtatgttttgggagagcattccggcacgaaattatgtgtgtatgatatcatgtatttttatagtcctgtgtattcgttaagttttctgttttctgtagcaaatgt

SEQ ID NO: 1492 - DNA, 2046 bp, Trigonella foenum-graecum
cggccgggggtttacatcatcagtctgctgtaccaacgtgacatctcatgctattaagcgacactttaacacagctcagcaacacgttaccaagacccttctgtgggacattttcacaaacaccttggtgaatcgtttcaccgcgaagtagaaatctttggaggaagaagatgagtttcagggaagagagtggagatggaagggaccttcagaaaccgtttcttcataccggaagttggtataaaatgggttcaagacaatcaagtgttatgggttcaacaacttcggttatgcgcgagggttccgtttctgttcttttctgtgttctaatcgctgctttgggtccaattcaatttggtttcacgtgtggatattcttctccgacgcaacaagctataatcaacgatctaaagctctcagtttcggagttttctttgtttggatctttatcaaatgtgggtgctatggtgggagctatagcaagtggtcagatagcagaatacgtcgggcgcaaagggtcattgatgattgcttcgattcccaatataatagggtggcttgccatttcgtttgccaaagactcctcctttttgtttatggggaggttgttggaaggttttggcgttgggattatctcttatgtggtgcctgtttatatagctgagatagcacctgagaacatgagaggtagccttggatcggtgaaccagctctctgttactattggaataatgctggcttatctgttaggcctttttgccaactggagagtgcttgcaatcctaggaattttgccatgtacaatattgatacctggattatttttcatcccagaatctcctagatggttggccaagatggggatgacggaagagttcgagacttcattacaagttttgaggggatttgacaccgatatatctgttgaagtacatgaaattaagaaagctgtggcatcaaatggaaaaagagctacaatccgttttgcggatctcaagaggaaaagatattggttccctttatcgataggaattggattacttgtacttcagcagttgagtggtatcaatggagttttgttctattcaactaacatctttgcaaatgcaggaatttcatccagcaatgctgctaccgttggacttggagctattcaggtcatagctactggaatagctacttggttggtggacaaaagtgggcggagggtcctcctaatactatcctcatctttaatgacagctagccttctcgttgtttccatagcattctatctggagggagttgtatcaaaggattcacaatatttcagcattttgggaacaatatctgttgttggcctagtggttatggtaattgggttctctctaggacttggacctatcccttggcttataatgtctgagatacttcctgtgaatataaagggccttgctggcagtacagcaaccatggctaattggctagtagcgtggatcatcacgatgactgcaaacttgcttttgacttggagcagcggagggacattcttaatctacacagtggtagctgcttttactgtcgtatttacgtcactatgggtgcctgagaccaagggaagaacattggaagaaattcagttttccttaagatagagtatgttttgggagagcatgtcggtagtctctcatgttgatatcatgtatttttatagtcattaagtttttctgtggcaaatgtaagaagaaaaagaaaaatcagttcattgcttatttttttatgtacaagctgctgtggagaagaatatgtaatagccaaagaatgagaaagaaacttgtcttctacaagatggaatatgtagttaccatccttcccttcggtcaaaagaaataaagagagaaaaattaccttccggttcgaaaaaaaaagaaaaaaaacaaaacaatgtcggccggggactaaaaatcaatcaaacacataaaacaatggtcccaagaactacgtacgcttgattcctcattgcacatgaggatacgtaggagcaaggggtccattcttgtcaagcat

SEQ ID NO: 1493 - DNA, 2155 bp, Arachis hypogaea
agttaattaatcacgtaacctaatctattaatgcattattattacattatttcccttgatgcgtgcgaatagcagaacaggtgccatatccctcgtgaggctttcaggtttgattaccaaatgtagcatcaaacacgcgacaattattgaagcttcagaattgagattcagacccccacacataataactaacaacaataataataatccaccacttgagagtgagataagcatgattgaatgagtagtgcacgcacttcactccctcaccacaccaacaacgcaaaatctaaaccaatccaaacattttatattttcccaacaaattcctagcttcgattcccaaagcagacaaaattcacttgaaacatcttgtcctcttgttcaaatctgacgaacaacaacaacaatttctgacttgtcaattaatcacagctcagcagtgagctgctaccagtcaagactgacatcccttttctgtgtgacattttcacgaacacgtagaacgcaagaggaagaggagggggttctgttctgaaccagcagcgaaaagatgagtttcagggatgaggaagcggttgggagggaccttcagaaaccgttcctccacacggggagctggtacaagatgggttcaaggacgtccagcaccatgggctcatctgcacaggtcatgcgcgacggtgccgtttcggtccttttctgcgttctcgtcgccgccttgggtcccatccaattcggtttcacgtgtgggtattcttcgccaacgcaggaagccataatcaaagatctaaagctctcactttccgagttctcagtgtttggatctctgtccaacgtgggtgccatggttggagctattgcaagtggtcagatagcagagtatattggtcgcaaagggtcattgatgattgctgcaataccgaatataatagggtggctcgccatttcttttgccaaagattcctcgtttttatttatggggagattattggaaggttttggcgttgggattatatcttatgtggtgcctgtttatatagctgagatagcacctcaaaacatgcgaggcagccttggatcagttaaccagctatctgttacgattggaataatgctggcatatctgcttggcctttttgtcaactggagagtgcttgcaattttaggaattttgccttgtacagtattaattcccggattatttttcataccagaatctccccgatggttggccaagatggggatgacagatgagtttgaaacttctttgcaagtacttcgaggatttgatactgatatatctcttgaagtacaagaaattaagagatctgtggcatcatcaggaaaaagagtaacaatacggtttgcagatctcaagaggaaaagatattggttccctttaacgattggaattggattacttgcacttcagcaattgagcggtatcaatggagttttgttttatgcaacgatcatctttcagaatgcaggaattcaatccagcagtgctgctacagttggacttggagctattcaggtcatagcaactggaatcactacatggctggtggacaaaagtggaagaagactacttctaattatatcgtcatctctaatgacagttagtcttctcgttgtttctgtagcgttctatctggagggagttgtatctgcagattctcatctgcaaaacattttggcaactgtttctgttgttggacttgtggttatggtaattgggttctccctagggctgggaccaatcccatggcttataatgtcagagatacttccagtgaatataaagagccttgctggtagtgtagccaccatgacaaactggttgactgcatgggggatcacaatgacggcgaacttgcttttgagttggagtagcggaggaacattcgcaatttacatggtggtaactgccttcaccgttttctttacggcattgtgggtacccgagaccaagggaagaacattagaagaaattcagtcttcctttagatagatgtgtactgtggagagaacatggggcggtagtgtgtattcattgaaaattatattttgttgagcataatgtatttctgtagccctgtggaatcatcgtcatgtattatgttagttgtttcaaagggaaagatttgct

SEQ ID NO: 1494 - DNA, 1862 bp, Lupinus angustifolius
tgttaaggcataagaaacgtcatcaacaacccatagtaacataaagataagcatgaatgacgttggatgaaaataactaaatctatttatcatcttccccacttgtttcatcatttcaaaacttctctttgacattttcacaaacaccttcaacgctgtcttttcgaaatgagtttcagagatgaaaattccgaaaacaaggaccttcagaaaccgttccttcacacagggagttggtataaattgggtacgaggcaatctagcatgatgaattcttccactcagatcattcgcgatggttccgtttctgttcttttctgtgttctcatcgctgccttgggtcctattcaatttggattcacgtgtgggtattcttctcccacgcaacaggctataataagcgatctaaaactctcaatttcggagttctctgtgtttgggtccttatcgaatgtgggtgcaatggtgggagctatagccagtggtcagatagcagagtacatcggtcgcaaagggtcgttgatgattgcttccatccccaatataatagggtggctcaccatttcatttgccaatgactcctcatttttattcatgggaagattgttggaaggttttggcgttgggatcatctcttatgtggtgcccgtttatatagctgagatagcacctcaaaacatgagaggtagccttggatcagtgaaccagctctcggtcacgattggaataatgctgtcgtatctgttgggtctttttgtcaactggagagtgcttgcaattctaggaattttgccttgtacaatattaatacctggattatttttcataccagaatctcccagatggttggccaagatggggatgacagatgaatttgagacttctttgcaagtgttgagagggtttgacacagatatatctgttgaagtacatgaaattaagagatctgtagcatcaacgggaaaaaggactacaatccggtttgccgaactccagaggaaaagatattggttccctttaatggtaggaattgggttgcttatacttcagcaattgagtggtatcaatggagttttgttctattcaagtaccatcttcgcaaatgcaggaatttcatccagcaatattgctacagttgggcttggagctattcaggtcgtagcgactggagtctctacatggttgatggacaaaagtggtcggaggttgcttctaataatatccgcatctataatgtcagttagccttctccttacttctatagcattctatctggagggagtcgtgctgaaggattccaatctatccaacattttagcaatactctctgtcgttggggttgtggttatggtaattggtttctctctaggccttggaccaatcccctggattataatgtcagagatacttcctgtgaatataaaaggccttgctggcagtatagccaccatggcaaattggcttatttcatgggtaatcaccatgactgcaaacttgcttttgacttggagcagtggagggacattcttaatctacacagtggttgctgcttttactgttgcttttgtggcattatgggtccctgagactaagggaagaaccttggaagaaattcagttttcctttagatagatatgtttgtttgggaaatcatataagactgtcttgtttaaagcgatgtgtgccctacaacatcaaatatttatggtcctttgtaaccattttgtaccatattttctgtatcaaatggaatgaaaaaggaaaataaccagtgcatctgcattttgtcctgaagtaccactgggtactacatcctcatagcactcatgcaaaatgtctattcaatagtttagatctaccca

SEQ ID NO: 1495 - DNA, 1982 bp, Trifolium pratense
gggggggggggtggcggtggtggtggtgatggaagggatcttcagaaaccgtttcttcataccggaagttggtataaaatgaattcaagacaatccagtgttatgggatccaccactcagattatgcgcgatggttctgtttctgttctcttttgtgttcttattgctgctttgggtcctattcaattcggtttcacgtgtggatattcttctccgacgcaacaagctataatcaaggatctaaacctcacggtgtcggagttttctttgtttggatctttatccaatgtgggtgctatggtgggagctatagccagtggtcagatagcagaatacgtcgggcgcaaagggtcgttgatgattgcttcgattcccaatataatagggtggctcgccatttcttttgccaaagactcctcgtttttgttcatggggaggttgttagaaggttttggtgttgggattatctcttatgtggtgcctgtttatatagctgaaatatcacctgagaacatgagaggaagccttggatcggtgaaccagctttctgttacaattggaataatgctggcttatcttttgggcctttttgcgaactggagagtgcttgcaatcctaggagttttgccttgtacagtattaatacctggattatttttcataccagaatctcctagatggttggccaagatggggctgatggatgatttcgagacttcattgcaagtgttgaggggatttgacacagatatatctgttgaagtacatgaaattaagagagctgtggcatcaaatggaaaaagaactacaatcagttttgcggatctcaagaggaaaagatattggttccctttatcgatgggaattggattacttgtacttcaacaattgagtggtatcaatggagttttattctattcaactagcatctttgcaaatgcaggaatttcatccagcagtgctgctactgttggccttggagctattcaggtcatagctactggagtagctacttggttggtggacaaaagtgggcgcagggtgctcctaataatatcatcatctttaatgacagctagtcttctcgtcgtttctgtagcattctatctggaggaagttgtatcaaaggattcagaatatttcagcattttgggaataatatctgttgttggccttgtggttatggtaattgggttctctctaggacttggaccaatcccttggcttataatgtcggagatacttcccgtgaatataaagggccttgccggcagtatagcaaccatggctaattggctagtagcgtggatcatcacaatgactgcaaacttgcttttgacttggagcagtggagggacattcacaatctacacaatagtatctgcttttactgttgcatttacggcactatgggtgcccgagaccaagggaagaacattggaagaaattcagttttccttaagatagagtatgttttgggagagcataccggtaaatgatgtgtgtatgatatcatgtatttttatagtcgcgtgtattcatcaagtttttgtagcaaatcacgtagtttatttgtattattacaagttacattctgccttgcctaatgggaagaaggaaatagagtgaataggttaccaatctttgtatatggagtcatcttgttgtattttatgtctgtaatctggatatcagattaagaaatacaatgatgaaaaacaaactgttttgagttaggatgattattttgatccatgtatgcatcatggaagataataatatatgaataaaaatatttttcatcgtctttgcactaaaaatgtgttgtgagacgggtgcaagtacttgtaacataaattgtatgaatttgttttaacataaattgaaaaattaaagataacacatttaagattacccgaagttgcatgatttaaataaattaagaaataagataagatatattagcaactaaattttggaaa

SEQ ID NO: 1496 - DNA, 1764 bp, Lupinus angustifolius
agatacatggaactgcattttctctgagactcttcctcactacatctgagactctttaccagaaaaaaagaaaatgagtttcagggaagacaacgctgaaaacagagagcttcagaaaccgttcctccacactgggagctggtacaaattgggtacgaggcaatccagcatgatgagttcaactcaggttatacgcgacggctctgtttccattctcttttgcgtcctcatagccgccttgggccccatccaattcggtttcacgtgtggctattcttctcccacgcaacaggctttaataagtgatctaaatctgacaatttcggagttctctctgtttgggtctttatcgaatgttggtgcaatggtgggagctatagccagtggtcagatagctgagtacatcggtcgcaaagggtcgttgatgatagcatccatccccaatataatagggtggcttgccatttcttttgccaaagactcctcatttttatttatgggaagattgttggaaggttttggcgttgggatcatctcttatgtggtgcctgtttatatagctgagatagcacctcaaaacatgagaggtacccttggatcagtgaaccagctctctgttacaattggaataatgatagcatatctattgggcctttttgtgaactggagagttcttgcaattctaggaattttgccttgtacaatattaatacctggattatttttcataccagaatctcccagatggttggccaagatgggtatgacagaggaatttgagacttcattgcaagtgttgcgaggatttgacacagatatatctgttgaagtacatgaaattaagagatctgtggcatcaacgggaaaaagggctacaattcggtttgccgatctgaagaggaaaagatattggtttcctttaatggtaggaattggattacttatacttcaacaattgagtggtgccaatggagttttgttctattcaagtaccattttcgcaaatgcaggaatctcatccagcaatattgctacatttggacttggagctattcaggtcctagcgactggaatctctacttggttgatggacaaaagtggccggagggtgcttttaataatatcctcatctataatgacagttagccttctccttacttctatagcattctatctcgagggaatcgtacctaaggattctgctctatcgaacattttggcattgctctctgtagttggggttgtggtcatggtagttgggttctctctaggccttggaccaatcccctggattataatgtctgagatacttcctgtgaatataaagagccttgctggaagtacagccaccatggcaaattggctaacttcatgggtgattactatgactgcaaacttgcttttgacttggagcagtggagggacattcttaatctacacagtggttgctgccttcactgttgcttttgtggcactatgggtccccgagacaaagggaagaacattggaagaaattcagttttcttttagatagatatgtttgggaaagcatataggtaatctgtcttgtttaaagtaaagtggtgtccccaacaacatcaagtatttatggtcctttgtaaccattgtgtattatattctgtaacaaatggaattgaaaaaatatattcagtgcaacaagttttattccaactgtaacctgattatttttatatataaactagttggttaccgtgcattcgaacaagtggcaatatattttgc

SEQ ID NO: 1497 - DNA, 1852 bp, Trifolium pratense
aagatagatatgataagaaccacgaactcaaccaacaaatctacacaccaacccttcttcaacaattattattattatttttctcatgttattattaagcgacactttaacacagctcagcaatatcacgttttcaaaaacctctgtgggacattttcacaaacacctttcagtcaaaataataataaaaccgtttcaccgcaacgcaacgtagaaatctttgaaggggaagatgagtttcagagaagaggctggtggtggtggtggagatggaagggatcttcagaaaccgtttcttcataccggaagttggtataaaatgaattcaagacaatctagtgttatgggatccaccactcagattatgcgcgatggttctgtttctgttctcttttgtgttctcatcgctgctttgggtcctattcaattcggtttcacgtgtggatattcttctccgacgcaacaagctataatcaaggatctaaacctcacggtttcggagttttctttgtttggatcgttatccaatgtgggtgcaatggtgggagctatagccagtggtcagatagcagaatacgtcgggcggaaagggtcgttgatgattgcttcgattcccaatataatagggtggctcgccatttcttttgccaaagactcctcctttttgtttatggggaggttgttagaaggttttggtgttgggatcatctcttatgtggtgcctgtttatatagctgagatagcacctgagaacatgagaggaagccttggatcggtgaaccagctctctgttacaattggaataatgctggcttatttgttggggctttttgccaactggagagtgcttgcaatcctaggagttttgccttgtacagtattaatacctggattatttttcataccagaatctcctagatggttggctaagatggggctgatggatgacttcgagacttcgttgcaagtgttgaggggatttgatacagatatatctgttgaagtacatgaaattaagagagctgtagcatcaaatggaaaaagaactacaatcagttttgcggatctcaagaggaaaagatattggttccctttatcgatgggaattggattacttgtacttcaacaattgagtggtatcaatggagttttattctattcaactagcatctttgcaaatgcaggaatttcatccagcagtgctgctactgttggccttggagctattcaggtcatagctactggagtagctacttggttggtggacaaaagtgggcggagggtgctcctaataatatcctcatctttaatgacagctagtcttttcgttgtttctatcgcattctatctggagggagttgtatcaaaggattcacaatatttcagtattttgggaatgatatctgttgttggccttgtggttatggtaattggattctctctaggacttggaccaatcccttggcttataatgtctgagatacttcctgtgaatataaagggccttgcgggcagtatagcaaccatggctaattggctagtagcgtggatcatcacaatgactgcaaacttgcttttgacttggagcagtggagggacattcacaatctacacaatagtagctgcttttactgttgtatttacgtcactatgggtgcctgagaccaagggaagaacactggaagaaattcagttttccttaagatagagagtatgttttgggagagcataccagtagtctctcatatttaaaatgaaatgatgtgtgtatgatatatgtatttttgtagtcacctgtattcattaagtttttgtagcaaatgtaagaagaaaaaattcagtgcattgctta

SEQ ID NO: 1498 - DNA, 1769 bp, Cicer arietinum
agacaaatctgcaaaactgtctcttgtctgctagcttactacccaactagttatagtatctcaacaacttcacaaccaacaagtatcatattcagtcagctatagtcatcaatatcataaacagacacagaggcagcgatcgatagaggcaccttctttacttgaacttgaagtgttgtttgaagcgacaatgagctttatcagggaagattgtgagaatggaaaagagcttaagaagccattcctcaacactggtagttggtacagaatgggttcgaatcagtccaacattttaaactcgtcaacacaatatgtcatgcgagatacatctgtgtctgtccttttatgtgtcctcatcgttgctttgggtcctcttcaatttggtttcacatgtggctatacttctccaacgcaagagagtataatcagtgatttaaatctctcactttcacagttctctgtattcggatctttatcaaatgtgggagccatggtgggagccattgctagtggtcaaatggcagaatacatcggacgcaaagggtctttgatgattgctgcgattcccaatataataggatggttggccatatcttttgccgaagactcgtcgtttttgtttatggggagatttttggaaggttttggcgttgggataatttcttatgtggttcctgtttatatagctgagatttcacctcaaaacatgagaggtacccttggatcagtgaaccagctatctgtcacaattggaataatgcttgcttatttgttgggcctttttgtcaattggagagtacttgcagttttaggaattttgccttgtacaatattaatacctggattatttttcataccagaatctccaagatggttggctaagatgagaatgacagaagagtttgagacttctttgcaagtgttacgaggatttgatactgatatatcacttgaagtaaatgaaattaagagatctgtgtcatcaatgggaaaaggtgttacaatccagtttgcagatctgaagatgaaaaaatattggtttcctttaatggtagggattggattacttgtactccagcaattgagtggaaccaatggagtgttgttttattcaagtaccatctttctaaatgcaggaatttcatccagcaatgctgctacagttggacttggggctattcaggtcatagttactggaatcactacttggttggtggacaaaagcgggcgaaggctacttctaataatatcctcatctataatgacaggaagccttattcttgtttctctagcattctatcttgagggagtcacagagaaggattctcctctatatagctttttgggaatactttctgttgttgggcttgtggccatggtgattggctactctcttggacttggaccgatcccttggcttataatgtctgagatacttccagtgaatataaagggccttgctggcagcatagccaccttgacaaattggatgacttcatggataatcacaatgactgcaaacttgcttttgacttggagcagtggaggaacattcacaatctacactgtggtagctgcatttactattgtttttgctgcaatttgggtcccagagaccaaaggaagaacattagaagaaattcagctttcctttagatagatatattaatgttcacaagtgcagtatcaaatcacaaaattgtactattttaattaaaatgatagctttgaaactagttatgaatataattaaatatttttaataatat

SEQ ID NO: 1499 - DNA, 1808 bp, Vitis vinifera
attcggaggctcgtcctctccaccgcgaatcaccaattccacctacgtctggattgcttcaaggggtgatcattgatcaaatctgagggctgataccaacgctgccatgagtttcagggaagaagaggatgggcgagatcttcgcaagccctttctccacaccggaagctggtaccggatgggctcccggcaatccagcattatgggatcctccgcgcagatcatccgcgacaactccgtctccgtcctcctatgcgtcctcatcgttgctctgggtcccattcagttcggcttcacctgtgggtattcttctcctacgcaatctgagatcatcagtgatcttggactttccctttcagagttctctatttttggttcgttgtcaaatgtgggggccatggttggggcaatagccagtggtcagattgcggaatacatcggcaggaaagggtcactaatgattgcttcgattcctaatataataggatggcttgcaatatcatttgcccaagattcatcatttctttatatgggaagattgttggaagggtttggcgttggtgtaatctcttacacagtgcctgtatatatagctgagatatcgcctcaaaatatgaggggaggcttaggatctgttaaccagctctcagttactcttggaatactattggcatatgtgttgggactttttgttaattggagggtacttgcagttttaggaattttgccatgcacaatattgatacctggtctatttttcataccagaatctcctcggtggctggccaaaatgggaatgacagaagattttgaagcatctttgcaagttctacggggatttgataccgacatttctgttgaggtgactgaaatcaagagatctgtggcatcaacaggcaagagaactaccatccagttttcagatctcaaacggaaaagatattggtttcctttgatggtagggattggattactcatgctccagcaactcagtggtatcaatggtgttctattctattccagtaatatctttgaagctgctgggatttcatcgagtgatattgcaacagttggacttggggttattcaggtcattgccactggggtcactacttggttggtggacaaagctgggcgcaggcttcttctcatagtatcctcctctggaatgactcttagcctcctccttgtctcagttgcattttacctgaaggatgtcatttcagaagactctcgattttatagcatattgggaatcctttcacttgttgggcttgtggctttggtaattaccttctctctaggagttggagccattccttgggttataatgtccgagatacttccagtgagtattaaaggacttgcaggcagcatcgcaacattggcaaattggctaacatcatgggcagttacaatgactgcaaacctactcctgagttggagcaaaggagggaccttcgctatttacacattaatgactgcttttaccatagtgtttgtgacactttgggtccctgaaaccaaaggaagaaccctggaagaaattcagcggtccttcagatgaatttgcttgctctgtgttcctgaaaccaaaggagaaatctggaagaaacacaacacccttcagatgaatttgttttctcaagcatgtatacgtcttccgtatcatacatgcctccgtcaccatgtataggttcagtttgcatttagtgttgttgcatgaaaccttgtgtattttttaggctctctgccataacagttgtgttggttaattttttatcaaggaaacaaataaataaataaat

SEQ ID NO: 1500 - DNA, 3233 bp, Quercus alba
gtgtcgttgatatggtcacatccctctcacacagctgtagcgcccaaaaacaaaaaaaagaacagaaaaatgtggataagtcctaaaatcaaatccgtcattaccatttttattatctgtctgtttcactttccagaagtcacacaccaacaacctcacacttttgtctttgtcccctcaataataatttcttttgtttttttaataattactattactcttcttcccgtctcttctctccctctctctctctctctctctgaggcatttcaacaaacaggtacagctcgaaaataaatatttctgatcttcgacatcaacgggactctgaaaaagacagaagcgaccgccatgagtttcagggacgaatctgaggagctgaagaagccgttcctccacacggggagctggtaccgaatggggtccaggcagtccagcatcatgggctcctccgcccaaataattcgcgacggctccatctccgtcctcttctgcgtcctcatcgtcgccctcggccccatccaattcggattcacctgtgggtattcttctcctacgcaagcagaaatagtcaaggacttgaaactctcagtctcagagttctctgtatttggttcattgtcaaatgtgggtgccatgattggggcaattgcaagtggtcaaatttcagagtacattgggcgtaaagggtcacttatgattgccgcaatccctaatataatcggatggctagcaatatcctttgccaaagatgtgtcgtttttatacatgggaaggttgttggaaggatttggcgtcggtattatatcttacacggtaccagtatatatagctgagatatcaccacaaaacatgaggggatcccttgggtctgttaaccagctcgcggtgactactggaataatgctggcttatctattgggtctgtttgtcaactggaggatgcttgcagttttaggaattttgccatgtacaatattgattcctggcttatttttcataccagaatctcctcggtggctggccaaaatggggatgaccgaagaatttgaagcctcattgcaagttttacgggggtttgatacagacatttctattgaagtgaatgaaatcaagagatctgtagcatcaacaagcaaaagaaccacaatccggttttcagatctcaagagaaagagatactggtttcctttaacgataggaattggattacttgtgctacagcaactcagtggtatcaatggcgtttttttctattcaagtaacatctttgaaagtgctgggctatcatcaagtaatgttgcaactcttggacttggggttattcaggttcttgctactgggatcacaacttggttggtggacaaagctggccgcaagctgcttcttattatatcatccactggaatgactctaagccttctccttgttgcaattgcattttatctagaggaccttgtatcagaagattctagcatttttgggatactgtcactcgtagggcttgtggctttggtgatttcattctctctgggggttggagctattccttggcttataatgtctgagatacttcccgtgaacattaagggccttgctggcagcatagcaacattggcaaattggctaacatcttgggtgatcacaatgactgcaaacttactcttgacttggagtagtggaggtaccttcacgatttacacattggtttctgcttttactgttgtctttgtgtcactttgggttcctgagactaaaggaagaactctggaagagattcagtcgtcgtttagatgaactttgttgctcaagcatgtattttaaactggttttgaagccaatatcatgcagaaagcgtcacatgcaggtgcagagatcatctacataatttctctccaaccattttgtatgttatttatagggtatcatgtatagacaatagtctctcagcagttgctctatggagtcggatataataaaagtaaatgaaagcaaaatttattcaaatcttgaaacaatcttagcttcacctattgaaatgttaaacacttaaaactatatcgttcttcattgaactttaacactgagcttggcacagagtacaaataatgtctacttactattggtattatcatttttgggctttatttgcgtgcaaggaggcaaggaattgcttcaaacacctattgtaaacgcaaggccgttcgaggtgaaccaagtgaccagccttaggtatgccttgaaatgatgcattttctccaagttgccctttcatgttttgggcaagctccaggttgaaaatctgatcattctcaccccataagagatgtatcttctgtggaaaattgggaaccttggtatccttgttgctaatgactaagccttctaggagttcacctctctccttcctgttggtgaacatcacctcaaggaagtctttgtgaaggcgatctgggaaccacagctttttgtgagcagcaacagagagaagagctttcaaacccttaacagaagtaggcaacaacagctccgaagaagaagagaacccaaggccttgcagcgtggtttgactgattgagtcagtcatggctatgatggacccagacaccaccatggactcaaccaagtctgcgtgctgctcagccattttgaacgctaccatcccaccatagctaaacccaaccacagtgcacctctccaccccaagcttccttaaccccgtaaccaaacactccgcttggaaactcggcgacctgtcggttttgtcagtgatagagccaccgaagaagaggaggtccggtatgtaaaccgagtagtttttggacaacgcaccaacttggaactgccatgtcacgatgccctcagaagcgaacccgtggactagaaccaccacaggtttgtttggtttagctgggggttcaggcttttcaccctttttttgggtttcttgagtgtctctactgggacccagaagctcatgactgtgcctggctcgatctccacagtgtagggttgcacaccagccatcttcattagcccatgcaacatgggtctctgtgcagccacaaggttcaccatgtctacctagctagcttgctctcttgatctgtctttcacagtttttggtagtgtcttattgtttccttttctctcttgcgtaattgagtgacatataaaggcaagaatttggggagagggtttggtgcagggttgttatcagtaattaaaattga

SEQ ID NO: 1501 - DNA, 1931 bp, Euonymus alatus
aggccgagcgcagtgcagcgggaccatgccagcggtgagaaaacaacgtcgaccttgcggagagtgggaatatccagcggggcagagctacgcttcgtcgtcgtaaaaaacgtcgctctccttctttaccgctcatttgatttaacgttcttctatttcgggcattttatcgaacagatacaataaaaacatcgagcagttcctgagagggatcgggggatagggagagatgagtttcagggacgattcagaggatggaagagatctggggaagccgttcctgcacacaggtagttggtacaggatgagttcaaggcagtctagcatgataagctctacgcaggcaattcgagagagttccatctctgttgtggcgtgtgttctgattgtggccttgggtcctattcagtttggcttcacgtcgggttattcctctcccacccaaactgcaatcactaaggatcttgatctcacggtttctgagtattctttgtttggttccttatcgaatgtgggtgccatggttggggccatagccagcggtcagattgctgagtatattgggcgaaaagggtctttaatgattgctgccattcccaatattatagggtggcttgctatctcttttgccaaggattcttcttttctctacatgggaaggttgttggaaggatttggtgtaggaatcatctcatacacggttcctgtttatattgctgagattgcacctcaaaatatgagaggggccttgggctcagtgaatcagctctctgtgacaattggaataatgctggcttatctgctgggactttttgttcaatggagaatacttgcagttttgggaatattaccatgtacggttttgatacctggcctgtttttcatcccagaatctcctcggtggctggcgaaaatgggaatgacggaagattttgaagcttctttgcaagttctccgtggttttgatactgatatttctattgaagtgaatgaaattaagagatctgtagcatcaacaagcaaaagaagcacaatacgttttgcagaactgaaacggaggagatattggtttcctctgatgattggaatcgggttgctaatgctgcaacagctcagtggaattaatggtgttctgttctattccagtacgatttttgaaactgctgggatttcttctagtaatgtggccacatttggacttggtgctattcaggtcattgctacaggagtatcaacatggttggtggacaaaacaggacgtaggctgcttcttatagtctcatcttgtgggatgacttttagcctcctggttgttgccatagcattctatgtaaaggctttcacatcagctgattcaagtctttatagcattttgggcatcatatcagtagttggggtcttgggaatggtaattgctttctcactcggacttggacccattccttggcttataatgtctgagattcttcctgtcaatatcaagggccttgccggaagcatagcaacgcttggcaattggttcatttcatgggtcattactatgactgcaaatttgcttttggattggagctctggaggaacctttaccatctacatgattgtgagtgctttcacggtggcattcgtgacaatatgggttccagagacgaaaggaagaactttggaagagattcaattttccttcagatgattttttttgttcattttgagttttgagttttgagttttatggcagtatgtagaagaggataatctatgcatttattatttgtaatattcggcgaaactgtgctattgtatcgctacacaactccatgtttcatatcttctgaaagatgtattttattgtatacaagaacatgctagtgagtagtgaaccttgctcatagaatcttctttttttaataaagctggcaaggttttcacttgat

SEQ ID NO: 1502 - DNA, 1675 bp, Tripterygium wilfordii
ggagcgatgagtttcagggatgattcagatgatggaagggatatgcggaagcctttcctacatacagggagttggtacaggatgagttcaaggcagtcgagcatgatgggctcgtcgcaggcaattcgagagagctccatatctgttgtggcgtgtgttttgattgtggctttgggtcctattcagtttggattcacgtgtggttattcctctcccacccaaactgcaatcactaaggatcttaatctcacggtttctgagtattctttgtttggttccttatcgaatgtgggcgccatggttggggccatagccagcggtcagatttctgagtatattgggcgaaaagggtctttaatgattgctgccattcccaatattatagggtggcttgctatctctttttccagggattcttcttttctctacatgggaaggttgttggaaggatttggtgtaggaatcatctcgtacacggttcctgtttatatcgctgagattgcacctcaaaatatgagaggagccttgggctcagtgaatcagctttctgtcacaattggaataatgttggcttatctgctgggactttttgttcaatggagaatacttgcagttctgggaatattaccatgtacggttttgataccaggcctgtttttcatcccagaatctcctcggtggctagcgaaaatggggatgacggaagattttgaaacttctttgcaagttctccgtggttttgatgctgatatttctattgaagtaaatgaaattaagagatctgtagcatcaacaagcaaaagaaccactatacgttttgcagaactgaaacggaggagatattggtttcctctgatgattggaatcgggttgctaatgctgcaacagcttagtggaattaacggtgttctgttctattccagtacgatttttgaagctgctgggatctcttctagtaatgtggccacatttggagttggtgctattcaggtcatcgccacaggagtagcaacatggttggtggacaagactggccgtaggcttcttcttatagtctcttcttctgggatgacttttagcctcctgattgttgccatagcattctatataaagggtttcacatcagttgattcaagtctttatagcatattgggcatcatatcagtagtcggggttgtgggaatggtaatttctttctcacttggacttggacccattccttggcttataatgtccgagattcttcctgtcaatatcaagggtcttgcaggaagcattgcaacgcttgccaattggttcatttcatgggtggttacaatgactgcaaatttgctcttggattggagttctggaggaacctttaccatctacatgatcgtgagtgctttcacggtggcatttgtgacgatatgggttccagagacgaaaggaagaactttggaagagattcaattttccttcagatgattttttttttgggttcgttttgagttttatggaagtatatatagaagaggctaatctctgcgtttattatttgtaattattcggcaaaaactgtgtcattgtatcgctacacaactccatgtttcatatcttcataaatatgtattttattgtagacaagaacatgccggtgtaccttgttgttcatcgaatcgaaaatgataaagat

SEQ ID NO: 1503 - DNA, 1683 bp, Castanea mollissima
tgatctttgacagcaacgggactctgaaaaagacagaagcaatcgcaatgagtttcagggacgaatctgaggagctgaagaagccgttcctccacacggggagctggtaccgaatggggtccaggcagtccagcatcatgggctcctccgcccaaatgattcgcgacggctccatctccgtcgtcctctgcgtcctcatcgtcgccctcggccccatccaattcggattcacctgtgggtattcttctcctacgcaagccgaaataatcgaggacctgcatctctcaatctcagagttctctgtatttggttcattgtcaaatgtgggtgccatgattggagcaattgcaagtggtcaaattgcagagtacattgggcgtaaagggtcacttatgattgctgcaattcctaatataatcggatggctagcaatatcctttgccaaagatgtgtcgtttttatacatgggaaggttgttggaaggatttggcgtcggtattatatcttacacggtaccagtatatatagctgagatatcaccacaaaacatgaggggatcccttgggtctgttaaccagctcgcggtgactactggaataatgctggcttatctattgggtctgtttgtcaactggagggtgcttgcagttttaggaattttgccatgtacaatattgatacctggcttgtttttcataccagaatctcctcggtggctggccaagatggggatgaccgaagaatttgaagcctcattgcaagttttacggggttttgatacagacatttctactgaagtgaatgaaatcaagagatctgtagcatcaacaagcaaaagaaccacaatccggttttcagatctcaagagaaagagatactggtttcctttaacgataggaattggattacttgtgctacagcaactcagtggtatcaatggcgttttttcattcagtaacatctttgcaagtgctgggctatcatcaagtaatgttgcaactcttggacttggggttatacaggttcttgctactgggatcacaacttggttggtggacaaagctggccgcaagctgcttcttattatatcatctactggaatgactctgagccttctccttgttgcaattgcattttatctagaggacattgtatcagaagattctagcatttttgggatactgtcactcgtagggcttgtggctttggtgatttcattctctctgggggttggagctattccttggcttataatgtctgagatacttcccgtgaacattaagggccttgctggcagcatagcaacattggcaaattggctaacatcttgggcgatcacaatgactgcaaacttactcttgacttggaatagtggaggtaccttcacgatttacacattggtttctgcttttactgttgtctttgtgtcactttgggttcctgaaactaaaggaagaactctggaagagattcaatcgtcgtttagatgaactttgttgctcaagcatgtatttatcttaaactggtcttgaagccaatatcatgctgcaagcgtcacatgcaggtgcagagatcatctacataatttctctccaaccattttgtatgttatttatagggtatcatgtatagacaatagtctctcagcagttgctctatggagtcggatataataaaagtaaa

SEQ ID NO: 1504 - DNA, 1785 bp, Prunus persica
gacgattggagacaacaatcatagagtaggcaggccacaatgagtttcagggacgacaatgaagagggaagagatctcaggaagcccttcctgcacactgggagctggtaccgcatgggttccaggcaatccagtatgatgggctcgtcccaggtcattcgagatagctccatttctgtggtggcttgtgttatgattgtcgctttgggtcctatccaattcggcttcacctctggatattcttctccgacccaatcagcaataatcaaggatcttggactcacagtgtcagagtattctatttttggttctttatcaaatgtgggtgccatggtaggagctatagccagcggtcagattgctgagtatattggtcgcaaagggtctttaatgatagctgccattcctaatgttatcggctggcttgctatatcatttgccaaagattcttcttttctctacatgggaagactgttggaaggatttggcgtgggaataatctcgtacacggtgcctgtatatatagctgagatagcacctcaaaacttaagaggtgctttgggttcagtcaatcagctctctgtaaccattgggataatgctggcttatctgcttggacttttagttcagtggaggatacttgcagttctgggaatattgccttgtacgatattgatacccgggctctttttcattccagaatctcctcgatggctggcaaaaatgggtatgaccgaggatttcgaagcctctttgcaagttctccggggattcgatactgatatttcggttgaagtgaatgagatcaagagatctgtagcatcaacaaccagaagaacaacaattcggtttgcagaactcaaacaaaaaagatattggcttcctttaatgattggaattggtttacttgttcttcaacagctaagtggaattaacggtgttctattctattccagtaccattttcgcaactgccgggatttcatcaagtaatgtagccacatgtggccttggtgctgttcaggtcatagccaccggggtgactacttggttggtggacaaatcaggccgtcggcttctgcttattatctcttctgctggaatgacagttagcctcctaatcgttgcagtagcattctttctaaaggatttggtagcaactgattcaaatttgtttagcatattgggcatcataacagtggttggagttgtggccatggtaattttcttctctctgggtgtaggagctattccatggattataatgtccgagattcttccaattaatattaaaggccttgctggaagcatagcaacacttgccaactggttcatatcctgggtggtcacgatgactgcaaacttgctgttggaatggagcagcggaggaaccttcaccatttacatgcttgtgagtgctttcactgtcgtatttgtaaccatttgggttcccgagacgaaagggagaactctggaagagattcagttctccttcagatgaggttttctttccccttcttgcatattacttgctttcttccttctgttagaagaaaaaaccaagagataccattttgagataattccagagaaattgtgcaacgtgaaacgtgcacgttttgtaatcttttcgtgacataagaacaggcttcttcttcttcttcagccagccgttggtgttctattgctacattcattgctcgtcactatctttctagaggtagctgtaaactcacaacaattgtcttatagtttattaaattcattaaattaattttccgagcta

SEQ ID NO: 1505 - DNA, 1623 bp, Tripterygium wilfordii
agtttcagggacgattcagaggatgtaagggatatggggaagcccttcctgcacactgggagttggtacaggatgggttcaaggcagtctagcactatgggctcgtcgcaggcaattcgagagagttccatctctgttgtggcgtgtgttctgattgtggccttgggtcctattcagtttggcttcacgtctggttattcctctcccacccaaactgcaatcactaaggatcttaagctcacggtttctgagtattctctgtttgcttccttatcgaacgtgggagccatggttggggccatatccagcggtcagattgctgagtatattgggcgaaaagggtctttaatgattgctgccattcccaatattatagggtggcttgctatctcttttgccagggattcttcttttctctacatgggaaggttgttggaaggatttggtgtaggaatcatctcatacacggttcctgtttatattgctgagattgcgcctcaaaatatgagaggggctttgggctcagtgaatcagctctctgtcacaattggaatattgctggcttatctgctgggactttttgttcaatggagaatacttgcagttctgggaatattaccatgtttggttttgatacctggtctgtttttcatcccagaatctcctcggtggctggcgaaaatgggaatgacggaagattttgaagcttctttgcaagttctccgtggttttgatactgatatttctatcgaagtgaatgaaattaagagatctgtagcatcaacaagtaaaagaaccacgatacgttttgcagaactgaaacggaggagatattggtttcctctgatgattggaatcgggttgctaatgctgcaacagctcagtggaattaatggtgttctgttctattccagtacgatttttgaagctgctgggatttcttctagtaatgtggccacgtgtgcacttggtgctattcaggtcattgccacaggagtagcaacatggttggtggacaaaactggtcgtaggcttcttcttatagtctcttcttctgtgatgacttttagcctcctgattgttgccatagcattctatatgaagggtttcacatcagatgattcaagtctttatagcatattgggcatcatatcaatagtcggggtcgtgggaatggcaattggtttctcacttggacttggacccattccttggcttataatgtctgagattcttcctgtcaatatcaagggccttgccggaagcatagcaacgcttggcaattggttcatgtcatgggtcgttaccatgactgcaaatttgctcttggattggagttctggaggaacctttaccatctacatgattctgagtgctttcacagtggcattcgtgacaatatgggttccagagacgaaaggaagaactttggaagagattcaattttctttcagatgatttttttttgggttcgttttgagttttatggaagtatatatagaagaggctaatctctgcgtttattatttgtaattattcggcaaaaactgtgtcattgtatcgctacacaactccatgtttcatatcttcataaatatgtatttttattgtagacaagaacat

SEQ ID NO: 1506 - DNA, 1702 bp, Medicago truncatula
tcttttgtctcaacaaacatcacaagtaacaagggatagagacacctacctctcttgttgaactttgaagttttgtttctgaagctgcaatgagcttgatcagagaagattatgaagatggaaacaaccttaagaaaccatttcttaacactggtagctggtacagaatgggatcaaaacaaactaatatcttaaattcttcaactcaatatgtcatgcgagattcttctgtttctgtcctcctttgtgtcctcattgttgcattgggtcctcttcaattcggcttcacgtgtggctatacttctccaacgcaagagagtataatcagtgatctaaacctctcactttcagagttttctctatttggatctttatccaatgttggagccatggtgggagccattgctagtggtcaaatggcagaatacatcggacgcaaagggtcattgattattgctgcgatccccaatataataggatggttggccatctcttttgcccaagactcgtcgtttttgtttatggggaggtttttagaaggttttggcgtcgggataatctcttatgtggtgcctgtttatatagctgaagtttcacctcaaaacatgagaggtacccttggatcagtgaaccagctatctgtcacaattggaatattgctagcttatttgttgggcctttttgtcaattggagaatactagcagttctaggaattttaccatgtacaatattaatacctggattatttttcataccagaatcaccaagatggttggccaagatgagaatgacagaagagtttgagacttctttgcaagtgctacgaggatttgatactgatatatctcttgaagtacatgaaattaagaaatctgtggaatcaatgggaaaaggtgttacaatccagtttgcagatcttaagatgaaaaaatattggtttcctttaatggtagggattggattacttgtacttcagcaattgagtggaaccaatggagttttgttttattcaagtacaatctttctaaatgcaggagtgtcatcaagtaatgctgctacagttggacttgggattattcaggtcatagttactggaatcactacttggttggtggacaaaagtggaagaaggctacttctaataatatcctcatcaataatgacaggaagcctttttcttgtctcaatagcattctattttgagggagttacagagaaggattctcctctatacagctttttgggaatactttctgttgttgggcttgtggctatggtgattggctactctcttggacttggaccaatcccttggcttataatgtctgagatacttcctgtgaatataaagggacttgctggcagcatagctaccttgacaaattggctaacttcatggataatcacaatgactgcaaacttgcttttgacttggagtagtggaggaacattcttaatctacactgtgatggctgcgtttaccgttgttttcgcggcaatttgggtccccgagacaaaaggaagaacattggaagaaattcaattctcctttagatagatatttaaggaaagcatgtgtgttcgcctatcttagtttcaatcaaaatgttgttaaaatcacaaaattccatcttggacaaccttagtccaacataacatgccttgttgaaatttgcttaacatatcataagaaccttagtg

SEQ ID NO: 1507 - DNA, 1967 bp, Chelidonium majus
attgatctcaaattcatggcggatcacagcccaaaattaagcccagagtaaaagtatatagaagaagaaggctactagctaggtgctcaaaaatctgtttctctctctagagttaacgaaggcggtggtgatcgtcttcttcatcttcttcctcttctgagagaaataatgagtttcagagaagatagcgaggatgggagaggggagttacggaagccattcctccacacagggagttggtacaggatgggatcgagacagtctagcatgattgacaagcttggttcctccgctcaggtcatccgtgacagttctgtctctgttgttctttgtgtcctcatcgttgctttgggtcctattcagttcggcttcacgggaggttactcttctccaacacaagatgacattattaatgatttagggcttacgatctcagagttctctgtatttggttctttatcaaatgtgggtgctatggttggagccatcgctagtggtcagattgcggagtatattgggcgaaaagggtcgttgatgatcgcttccatccctaacatcattggttggctcgccatttcattcgccaaagattcttcctttttatacatgggaaggttattggaaggattcggcgtgggaatcatctcctacgtagttcctgtgtacattgcagagatagctcctcaggacatgagaggaagccttggttccgtcaatcagctctctgtcacaattgggataatgcttgcttatctcttgggactattctttagttggagagtgctcgcagttataggaatcttgccgtgtactattttaatacctggcctttttttcatccctgagtcccctcggtggctggcaaaaatgggaatgatggaagactttgaagcttctttgcaagttttacgtggatttgatacagacatttccattgaagtgaatgaaatcaagaggtctgtggcatcatcatcaaccagaaggactgcaatccgcttcacggaactcaagcaaagaagatattggtttccactcatggtaggaattgggttacttgtgctgcaacagctaagtggaatcaatggcattctattctactccagtaatattttcaaagctgctggggtttcatcaagtaatgcagcaacatttggacttggagccattcaggtcattgcaactggagttactacttggctggtggataaagctggtcgtcgccttcttctaattgtttcctcgtctggaatgaccgctagtctcctccttgtctccattgcattctatttgaaggaagttatagccaaggattctcatttctatagtgttctgggcatactgtctttggttgggcttgtggcctttgttgtttccttttctttaggagttggagcaattccatgggttataatgtcagagattcttccagtgaatattaagagtcttgccggtagcatagcaacactcgccaactggctaacatcctgggtgatcacaatgacagcaaatttgcttctcaattggagcaatggaggaacctttaccatttacacaattgtgagcgctttcacagttgcatttgtggcattgtgggtccctgagactaagggcagaacacttgaggaaatccaatggtcattcagatgatatactttcaggaaggcgttccttctcaaattcctagtatgcagtcaccttcttgaatatattgtgcggaaacattataatttggcatgaagtgaacaactcatatctgtaagtccattcgcctccatttgttgagtttgaccggctttgtagtattccttcttcttcatttaatttgctctttttgtccaatattgtttgtgtgatgttctctgttaacaatggtccaccttattcattcaaattattgtcagcaaagaaataatttctgctgtggggtattcatcctgttaaattcttactgcaatgcttgggcatgc

SEQ ID NO: 1508 - DNA, 1726 bp, Euonymus alatus
ataatccgcacctcttgcagaacaatcgtaactatatatatcgaacggttgctgttcacatttccggtctgtctctgtgcgttgaaaatgagttccagggacgagaacgaggacctgcggaagccgttcctccacaccgggagctggtaccggatgagttctcgacagtccagcagcataatgggatcgcagcttcttcgtgatggctccatatccgtcgttctttgtgtactcatcgttgccttgggtcccatccaattcggcttcacttgcggatattcctcccctactcaatctggaatcatcaacgaccttaacctatcaatttcagagttctctttgtttggttcattgtcgaatgtgggcgctatggttggggcaattgctagtggtcagattgcggagtacgttggccggaaagggtcgctaatgattgctgcaattcccaatataattggatggctcgctatatcttttgcgaaagactcctcgtttttgtatatgggaaggttgttggaaggctttggcgtgggtataatttcttacgtggtccctgtatatattgctgagatagctccacaagacatgagaggaggccttggatctgtgaaccagctctcagttacgattggaataatgttatcctatctgctgggactctttgtcaattggagagtgcttgcagttttgggaattttaccatgcacaatattgatccctggcttgtttttcataccagaatctcctcgatggctggccaaaatggggatgacagaagattttgaaacatctttgcaagttttgcgtggttttgatacagacatttctgttgaagtgaatgaaatcaagagatctgtagcatcatcaagcagaaagacaacaatccgttttgcagatctcaagagaaaaagatattggtatcctttgatggtaggaattggattactaatgctccagcaactcagtggcatcaacggtgttctattctactccagtaatatcttcgcaagtgctgggataaaatctagtgatgctgccacatttggtctgggggcaattcaggtcattgccactggggtcactacgtggttggtggacaaggctggtcgtaggctgctgcttgtaatatcaacaactggaatgactattagcctgatcctggttgcagttgcattttatttgaagggcaatctacctgaggattcccatttatataacatcatgggaatactgtcacttgtgggggttgtggctatggtgattgcattctcactgggagttggagctcttccttggctaataatgtctgagatacttccagtaaatatcaagggtctagctggaagcgtagcaacattgacaaactggttgtcatcctgggtagtcactctgactgcaaacttgcttttgacttggagcagcggagggaccttcactatatacgctgcagtctctgcatttactgttgtttttgtgactctttgggttcccgaaaccaagggaagatctcttgaagaaatccagtcgtcgatcagatgaaagcttttgctgaggcgtgtatgaatcctcagatgggtttttgaatatttaacaatttgcttgcataactcttcacttaagcttgcatcgatgtttatatgatcattgtgtctcatgttgtgggtcttcccatcataattgctctgttattgtttggaaaaaaaaaaagggagtataccgaaagttc

SEQ ID NO: 1509 - DNA, 2731 bp, Theobroma cacao
gtcgttttatgccggtaaaaggcccctggttctaggatctagtctttgaaatcatggattgttgccaaaaaccgacaatcctcgaccattaaagcatggatacggccccgaccaaactctttaattacaattattccgaagaaagaacaaccaaaatagccgccacgtcggcacaacacgtgtcttttctcccatacaaaattctgagaaactcgacactcgtcatcatcatcatcctcatcgtttcctttttttcctccttcaatcaaaagcccagagcttcgagtttcctgcaaaatttgatcgtcgcaaatcgggcgtctttttttttttctttgtctcccctgcaacgagaggcgatgagtttccgggacgataatgaagaaggccgggatctcaagaagccgttcttgcataccggaagctggtatcggatgagctcgaggcagtccagtgtcatgggctcctcggcccaagtccttcgcgacggatcaatctccgtcgtcctctgcgtcctaatcgtcgccttgggcccagtccaattcggcttcacctgtggatactcttctcctacgcaagctcaaatcatcaatgatcttaagctttcgatttcagagtattctatttttggttcgttatcaaatgtgggcgcaatggttggggcgatagccagtggtcagattgctgaatatattggccgaaaagggtcattaatgattgcggcgattcctaacataataggatggctggccatatcatttgccaaagattcctcatttttatttatggggagattgttagaagggttcggtgttggtataatttcgtacacggtgcctgtgtatatagctgagatatcaccacaaaacatgagaggaagccttggatcagtgaaccagctatcagttactattggaataatgctcgcttatcttttgggactgtttgcaaattggagagtgcttgcagttttaggaatcttgccatgtacaatattgatacctggcctattcttcataccagaatctcctcgatggctggcaaaaatgggaatgatggaagattttgaagcctctttgcaagttttgcgtggctttgatacagatatttctgttgaagtccatgaaatcaagagagctgtagcatcatcaagcaagagaacaacaattcgatttgcagatctcaagcgaaaaagatattggtatcctttgatgatagggattggattactggtgcttcagcaactcagtggtatcaatggtgttttattctattccagtaatatctttgaaagagctggggtttcatctagcaatgttgcaacagttgggcttggggctattcaggtcattgcaactggtgtgactacatggttggtggacaaagctggccgcaggctgcttcttatggtatcctcatctggaatgactctgagcctgctcattgttgcagttgcattttttgtcgagggcatcgtctctcaagattctgacctgtatagcataatgggaatactgtcactggtgggccttgtggcctttgtgatttccttctcactgggtattggagcaattccatgggttataatgtctgagatacttccaataaatattaagggtctagctggcagtgttgcaacgttggcaaattggatgacatcgtgggcaattactatgactgcaaacttgcttctgacctggagtggtggagggactttcacactttatgcaattgtggctgctttcactattgtttttgtggcactttgggtccctgaaacaaaaggacgaagtttggaagagattcagtcatccttcagataaaaatgttcttcactcaaggaagccagaaaacgcttaaggcacctattgtacacacaaggtcgctccaggtgaaccaggtggccagccttctttatgccttcgaatgttgtattacctccaagttgcctgtatagaaatatccaattacgcgaaagccatatgagtactactgaaagattgagaaacatcagtatctgacttttattgttgaggtagaacatactctttcatgttgtgggcaagctcctgcttaaagatttgatcttcttcaccccataacagatgtattctctgcaaattaatattgaaaaatgagagagcaaacatgggaaagtccaggaacaagaaaaagagaagcaaaatgcaaataaaaaacctgtggaaaagagggaatggtggcatccttgttgctaataaccaaggcctccaggagttcagctctctctttcctgttagtaaacatcacctgccagggggggggttgatcagaagtttccaactataacaatgacaataactgttccttcagtcaatggaactttcattttttaacgcaagggtcccttttttttaaggtttcctagtttggccaacgtttccaaatttttcatcattaaatttcccagggccacggccacctgcaacgagagaggagatattgtccacaggctctctaggtcattagacctgtcactgtatcaaaaacacttcttatagtacactgttaggtacagttggttgagcgaaacgcactagtcacatttttctcgttctgtgtccgcaattttcttccccctcatgaggttaaattaaaagtctaatttccttgccgggttttaatccaaattttccacttaaaatttctgtaaatttgttctatttcaacagtatcctcctttgtattctac

SEQ ID NO: 1510 - DNA, 1470 bp, Manihot esculenta
taaaactgcaccatgagttccagggaggagatcgatgatggacttaggaaaccttttcttcatactggtagttggtataaaatgagctccagacagtccagcatgatgggctcctccactcagtttatccgcgatggcgctgtctccgtcgtcctatgcgtcctcatagtggctttgggtcctgtccaattcggattcacttgtggatattcttcgcctacgcaagcggaaatcatcagcgatcttaaactctcaatttcggagttctctgtgtttggatctttatcgaatgttggcgctatggttggagctattgctagtggtcagattgcagagtacattggccgcaaagggtcgctcatgattgccgcaatccctaatgtaattggatggttatgcatatcatttgcaaaagattcatcatttttattcatgggaaggttgttggaaggatttggtgttggtataatctcatacacagtgccagtgtatattgctgagatatcacctcagaacttgagaggaagccttggagctgttaaccagctctcagttactcttggaatcatgctggcttacctattaggactttttgttaattggaggctgcttgcagttttaggaactttgccttgcataatattaatacctggcttgtttttcatacccgagtctcctcgatggctggccaaaatggggatgacagaagattttgaagcctctttgcaagtcttacggggatttgatacagatatctctgctgaagtgagtgaaattaagatgtctgtagcatcatcaagcaaaagaacaacaatacatttttcagatctcaggcgaagaagatattggttccctttgatggtaggaattggattactcatgctccaacagctcagcggcatcaatggggttttattctattccagtaatatctttgaaagtgctggggttacctcaagtaatctggctacagttggagttgggattattcaggttcttgccactggaatcactacatggttggtggataaagctggacgcaggattcttcttattatatctacttctggaatgactattagcttgcttcttgttgcagttgccttttatttagagggcattgtctcaaaaaattcccatttgtatagcattatgggaatgatgtcacttgtggggcttgtggccatggtaattttcttctcccttggacttggagctattccttggcttataatgtccgagatactcccggtgaatattaagggccttgctggcagcgtggcaacattggcaaattggctgacatcctgggtggttacaatgactgcaaacttgctgttgagttggaatagtggaggcacttttaccatatatgcggtggtgactgctttcactgttgtttttgtgactctatgggtacctgaaaccaaaggaagaaccctggaagaaatacaatcatccttcagataa

SEQ ID NO: 1511 - DNA, 1667 bp, Gossypium hirsutum
ttttcttctccgttgtttaatttagagcgaattggcgatgagtttccgggacgataatgatgaaagtcgggatctcaagaagcccttcttacataccggaagttggtatcggatgagttcgaggcagtccagtattatgagttcttctgctcaagtccttcgcgatggatctatctccgtcgttctttgtgtcctcatcgttgccttgggccctatccaatttggctttacctgtggatattcttctcctactcaagctgaaattatcagtgatcttaagctttcgatttcagagttttctatttttggttcgttgtcaaatgtgggcgcaatggttggggcaataaccagtggtcagattgctgaatatattggccgaaaagggtcgttgatgattgctgcgattccaaacataataggatggctggccatatcatttgccaaagattcttcgtttttatttatgggaaggttgttagaagggttcggtgttggtattatttcttatacggtgcctgtgtatatagctgagatagcaccccaaaacatgagaggaagccttggatcagtgaaccagctatcggttactattggaataatgctggcgtacctgttgggactctttacaaattggagagtacttgcagttttgggagtattaccttgtacaatattgatacctggcctattcttcataccagaatctcctagatggctggcaaaaatgggaatgatggaagattttgaagcctctctgcaagttttgcggggctttgatacagatatttctgttgaagttaatgaaatcaagagagctgtagcatcatcaagcaggagaacaacaattcgatttgcagatctcaagcgaaaaagatattggtatcccttgacgatagggattgggttactggtgcttcagcaactcagtggcatcaacggtgttttattctattccagcaatatcttcgcaagtgctggggttgcgtctagtgatgttgcgacatttggggttggggccattcaggtcattgcaaccggggtgactacatggttggtggacaaaactggccgcaggcttcttcttatggtatcctcagctggaatgacactgagtctgctaattgttgcagttgccttttatgttgagggcatcgtctctaaagattctgacttatatggcataatgggaatactgtcattggttggtcttgtggcctttgtgattgccttctcactgggaattggagcaattccatgggttataatgtctgagatacttccagtaaatattaagggcctagctgggagtgtagcaacattagcaaattggctgacatcatgggtgattactatgacggcaaacttgcttctgacctggagtggtggaggaacattcactatttacgcagttgtgacggcattcacggttgtttttgtggcactttgggtccctgaaaccaaagggagaagtctggaagagattcaatcttccttcagataaaaaaaacgttcttcagtgtaatgcattttatctttaccgatttgattttcaaagttgttaagagtatatatgcgcagttcatgtccagcaaacctgtaccatgtattgttttcctgttgtttgataacatgtttgcactactattttacaagggggaatttattcc

SEQ ID NO: 1512 - DNA, 2128 bp, Papaver somniferum
atattgtatgttaaatagaacaagacgaaattaagacacgaaatatctatctggacaatagctgtgtgtacatttacgattttgtcctaacgtggtcctcttccttaatctcctcctcatctctttgtcatcatcattcatcaccagattcaccacccttcaaatcctcagactcttcttcttttctatattttgaaatctctgttaatgtgatgatgattttccattttcatgaaagatcacgttaaaccctaactattcaattctattgaggaataggaatcgtttcaaataattgttattagtttctctgaaattaacgaaaagatgagtttcagagaagatagtgaagatgggaaggatttgcggaaaccatttctacatactggaagttggtatagaatgggatcaagacaatctagtatgatggagaaaattggatcctccgcgatgatgcgtgatggttcagtttctgttgttctttgtgttcttattgttgctttaggtccaattcagtttggtttcacgggaggatattcatctcctacacaagatgacatcattcgagatctcggacttacaatttcagagttttcggtttttggttctttatcaaatgtgggtgctatggttggagctattgctagtggtcagattgccgagtacattggcagaaaagggtcattgatgattgcatctattcctaatatcatcggttggctcgccatttcatttgccaaagattcttcgtttttatacatgggaaggttattggaaggattcggcgtgggagtcatttcctacgtggtgccagtttatatagcagagatagcccctcaggatatgagaggtagtcttggatcagtcaatcagctttctgtcacaatcggaatcatgttggcttatatcttgggattatttgttgaatggagagtgctggcagttatgggaataattccttgtacaatcttaatcccagcgctatttttcatccccgagtcccctcgttggctggcaaaaatgggaatgacggaagactttgaagcatctttacaagttttgcggggatgggatactgacattactcttgaagtgaatgaaattaagaggtctgtacaaacatcatcaactcgaagaactgcaatccgcttctctgatctcaagcaaagaagatattggttcccactcatggtaggaattgggttacttgtgcttcagcagctaagtggaataaatggcattctgttctactccagtaatattttcaaagctgctggggtctcatcaagtaatgtggcaacttgtggacttggagccgttcaggttattgcaactggagttactacttggttggtggataaagctggtcgtcggcttcttctaattgtgtcctcatctggaatgactgccagtcttctccttgtctcagttgcattctatttgaaggaagtcatagacaaggattctcatttctatagcattttgggcatattgtcactcgttggactcgtggcctttgttatttcattttcgctaggagtgggagcaattccatgggttataatgtctgagattcttccagtgaatattaagagtcttgctggtagtattgcaacactggccaattggctcacatcttgggtgatcacaatgactgcgaacttgcttctgaactggagtaatggaggaaccttcaccctttacaccattgtgagtgctttcacagtggcatttgtggcactatgggtgcctgagacaaaggggagaacactagaagaaattcaatggtccttcagataaatattcttttggttatgggggaagtcttcagagatattcttatttcgcggcgtcgtcctttcttgcatataaactgttcggaaatttttatctccaccatttgttgagtttcaccagctctatttcgtgtcttaattttcgtcttgttctattttttgtcttacattttaagtttcatattgtatgttaaaaaagtttttaacaatgggttcctcttattcttcaaaatgttgacggcaaagaaattatgtatacaggcattttcagtgcacatatgaatcattttatcgacctcatgttctcgaggcctccgaaccaaaaaaaaaaa

SEQ ID NO: 1513 - DNA, 1883 bp, Ricinus communis
gacgttcttgccactctcttgtctctttcaaaacgaagaatattcaaatgcgcattgcttcaccgccattgaacaaacttacccagtacttgtttgtcttgtttctttgattatttttcgtttttggccaaaatgacttcgagagaagaggccggagatgatggagtaaggaaaccgttgctgcacacaggaagttggtatagaatgagttcgaggcagtccagtatgatgggctcttcttctcagtacattcgtgatggcgctgtttctgttgtcctctgcgtccttatcgttgctctgggtccaatccaatttggtttcacctgcggatattcttcgcctacacaagcagaaatcattagggatcttaatctctcaatttcggagttctctttgtttggttctttgtcaaatgttggtgctatggtcggagctattgctagtggtcagatggcagagtacattggccgcaaggggtcactgatggttgctgctattcctaatataattggatggctaagcatatcatttgcgaaagattcttcatttttattcatgggaaggttgttggaaggatttggtgtcggtataatatcatacacggtaccagtatatatagctgaaattgcacctcagaacaggagaggaagccttggatcagttaatcagctctctgttactctggggataatgctcgcatatctgttaggactttttgtacactggagattgcttgcagttttaggaattttgccttgcacaattttaatacccggcttgtttttcataccagagtctcctcgatggctggccaaaatgggaatgacagaagattttgaagcgtctttgcaagttttacggggattcgatacagacatttctgctgaagtgaacgaaatcaagagatctgtagcatcatcaacaaaaagatcaacggttcgattcgcagatctcaggcgaagaagatattggttcccattgatggtgggaattggattacttatgctccagcaactcagcggtatcaatgggattttattctattccagcaacatcttcgaaagtgctgggctttcctcgggtaatcttgctacagttggacttggggttattcaggttctggccactggggtaactacatggttggtggataaagctgggcgcaggcttctcttgattgtatctacatctggaataactgttagcctgcttcttgttgcagttgccttttatttagagggcaatgtttcgaaagattcccatttatatggcataatgggaatattgtcacttgtggggctcgtggctatgataattttcttctctcttggtcttggagctattccttggattataatgtctgagatactcccagtgaatattaagggccttgcgggcagtgtggcaacactggcaaattggctaacctcctggctggtcactatgactgcaaacttgttgttgagttggagtagtggaggaacctttactatgttcacactggtgtctgcatttacagtagttttcgtgactttatgggtccctgaaaccaaaggaagaactctggaagaaatccagtcatccttcagatgatactagtgtctgtgtctgctcctagcgtgtgtaatctgatttcaagtttcaactatttcctgtcattcttgctcttttattttattcattttcttctttgtaaatgctgaaagtgaatgagaaaaagaaaaaaggaaggaagaaagaaagaaggaagaagggaagaggaaaaaaaaaaaaaaaaaaaaaaggaacaagatttcatttaaattcactgatcttgtgtatgaatcatggattcatgtatttggctttggaactctttacatttgaaatattgcattttgaat

SEQ ID NO: 1514 - DNA, 1983 bp, Prunus mume
gacgtggcagaagatgagctcggttgcacagtcacagcacgaatctgttggtaacggcaaggtgcggagctggacttataggccagcacgataaacggacgattggagactataatcatagcgtaagcctataggctccatttatattacggcttctcttctctgtgggtcgttttgcacgcagtgaactttgtctgtttctctgtttctctgatcgcagaggccacaatgagtttcagggacgacaatgaagagggaagagatctcaggaagcccttcctgcacactgggagctggtaccgcatgggttccaggcaatccagtatgatgggctcgtcccaggtcattcgagatagctccatttctgtggtggcttgtgttttgattgtcgctttgggtcctatccaattcggcttcacctctggatattcttctccgacccaagcagcaatcatcaaggatcttggactcacagtgtcagagtattctctttttggttctttatcgaatgtgggtgccatggtaggagctatagccagcggtcagattgctgagtatattggtcgcaaagggtctttaatgattgctgccattcctaatgttatcggctggcttgctatatcatttgccaaagattcttcttttctctacatgggaagactgttggaaggatttggcgtgggaataatctcgtacacggtgcctgtatatatagctgagatagcacctcaaaacttaagaggtgctttgggttcaatcaatcagctctctgtaaccattgggataatgctggcttatctgcttggacttttagttcaatggaggatacttgcagttctgggaatattgccttgtacgatattgatacccgggctctttttcattccagaatctcctcgatggctggcaaaaatgggtatgaccgaggatttcgaagcctctttgcaagttctccggggatttgatactgatatttctgttgaagtgaatgagatcaagagatctgtagcatcaacaaccagaagaacaacaattcggtttgcacaactcaaacaaaaaagatattggcttcctttaatgattggaattggtttacttgttcttcaacagctaagtggaattaacggcgttctattctattccagtaccattttcgcaactgccgggatttcatcaagtaatgtagccacatgtggccttggtgctgttcaggtcatagccaccggggtgactacttggttggtggacaaagcaggccgtcgacttctgcttattatctcttctgctggaatgacagttagcctcctagtcgttgcagtagcattctttctaaaggatttggtagcaactgattcaaatatttttagcatattgggcatcataacagtggttggagttgtggccatggtacttttcttctctctgggtgtaggagctattccatggattataatgtccgagattcttccaattaatattaaaggccttgccggaagcatagcaacacttgccaactggttcgtatcctgggtggtcacgatgactgcaaacttgctgttggaatggagcagcggaggaaccttcaccatttacatgcttgtgagtgctttcactgtcgtatttgtaaccatttgggttcccgagacgaaagggagaactctggaagagattcagttctccttcagatgaggttttctttccccttcttgcatattacttgctttcttccttctgttagaagaaaaaaccaagagttaccgttttgagataatcccagagaaattgtgcaacgtgaaacgtgcacgttttgtaatcttttcgtgacataagaacaggcttcttcttcttcttcagccagccgttggtgttctattgctacattcattgctcgtcactatctttctagaggtagctgtaaactcacaacaattgtcttatagtttattaaattcattaaattaattttccgacctagcagatttc

SEQ ID NO: 1515 - DNA, 2781 bp, Trigonella foenum-graecum
catccaaacgctcgatctgagcttttgtttggctactcacagagagagaaagcgaaaatacaatggtgtgttgagagagaaagagagagagttcgtgagtggagtttcattcatttcatgtctctccccacaaaacgttcaggcggcgctacttcatcttcaccttcttcttcaacctctatgaaaaaagctaaatcttcttcaaccttcgacgacgtcgttttcgactcttctatggcgccactcgacgacgatctcaaacctaccgaccttcctcgcgctgccgccgccgccggtatggctgctaatctcgctcggaagaaagctactcctcctcaacctgcgaagaagcttctcatcaagctccacaaaggtaatccaacagtgcccactaatttcgaggacaagacatgggcaattttgaagtctgctatttgtgctatatttttgaagcaacctgactcctgcgacttggagaggctttatcaagccgtcaatgatctttgcattcataaaatgggtgggaatctttatcaacggattgaaaaggagtgtgaagtacacatatctgcagcactgcagtctttggttggacaaagcccagatttgattgtatttctatctctagtcgagagatgttggcaggatctctgtgaccaaatgttgatgattcgtggtatagccttgtttctggataggacgtatgtgaagcaatcaccaaatatacggtcaatatgggacatgggccttcaaattttccggaaacatctttcattgtctcctgaagttcaacacaaaactgttactggtcttctgcgaatgattgatagtgaaagattaggtgaagcagtggatagaactcttctcaaccatcttttaaagatgtttactgctctgggaatttatgcagaaagctttgagaagccattccttgaatgcacctctgaattttatgccgccgaaggtgtgaaatacatgcagcaatcagatgttccagattacttgaagcatgtggagacaagattgcaagaggaacatgaaagatgtttgatctacttggatgcaagtactaagaagccattaataacaacaacagaaaagcaacttcttgaacgtcatatacctgccattcttgataagggtttctctatgcttatggatggaaatcgtattgaagaccttcaaagaatgcactcgctcttttcaagggtcaatgccctcgagtcattgaggcatgccattagttcatacatcaggagaactgggcagggcattgtaatggatgaggagaaagataaagacatggttcaatctcttcttgaatttaaggctgctcttgacacaacatgggaagacagctttgccaagaatgaatcattcagtaacaccattaaagatgcatttgagcatcttatcaatctccgtcagaaccgacctgcagagttgattgccaagtttttggatgataaacttcgtgcgggtaataagggtacttcagaagaggaattagagggcacacttgataaagtcctggttttattcaggttcattcagggcaaggatgtgtttgaggcattttataagaaagatcttgctaagagattactattaggaaagagtgcttctattgatgcggagaaatccatgatctccaagttgaagactgagtgtggtagccagtttacaaacaagctggaaggaatgtttaaggacattgaattatcaaaagaaataaatgaatccttcaggcagtcatcccaggcgagaacaaaactcccatcagggattgaaatgagcgttcatgtcttgacaacagggtactggccaacatatccacccatggatgtcagacttcctcatgaattgaatgtttaccaggatatttttaaagaattctatctaagcaaatacagcggaaggcgtctcatgtggcaaaattctttaggccactgtgtcctaaaggcagattttcccaaagggaaaaaggagttggctgtctccctatttcagactgttgttctgatgcaattcaatgatgctgagaaactaagctttcaagatatcaaggattctactgctattgaagacaaggaactgagaaggactctgcaatctcttgcatgtggaaaagttcgtgtcctacaaaagatgccaaagggtagagacgtggaagataatgactcgtttgtttttaatgatacatttactgcccctctttaccgtataaaggtgaacgcaattcagttgaaggaaacagtggaggagaacacacacaccacagaaagagttttccaagatcgtcaatatcaggttgatgccgctattgttaggataatgaagactaggaaagtgcttagtcacactcttcttattactgaactcttccaacagctcaaattccctattaaaccagctgatttgaagaaaaggattgaaagcctgattgacagagaatatctagagagggacaaaagcaatcctcaagtatacaattacctggcatagtatattttacctcattttacatttcaaagtttcttttgttttgttttttaattgatatgggaaaagcttaatgttgtattccctagtcatatatgtacagtaagaacagatcccacctcttcccttttttgccttttttatttatcgacaactgtactgtaattgtaaagtatatttttcctcctttgtatttcctttcattttcttgaaaaatcaaaattgttccaaaaaataccgagattccagaacgagctctctcatataatgaacattatc

SEQ ID NO: 1516 - DNA, 2706 bp, Glycine max
tgtgttctgttaccctttcctttcctcttgagttgggttcgggtgacaacacaaacacaaacacgatggtgtgttgatcagtctcttttctctctctttccatttgatgtctctccccaccaaacggtcgggcaccgctggttcctccccgtcgccgccaccccctatgaaaaaggccaagtccctcctcctccactcctcctcctcctccgacgccgttctggacccttcctccatgcctctcgacgacgatctccccaatgcccgcgccgccaatctcgcccgcaagaaagccaccccgccccaacccgccaagaagctcctcatcaagctccacaaagctaaaccaacattgcccacaaattttgaggaggatacatgggcaaaactaaagtctgccattcgtgctatatttttgaagcaacctaactcttgtgatttggagaagctttatcaggctgtgaatgatctctgcctttataaaatgggtggaaatctttatcaacgaattgaaaaggagtgtgaagcacatatatctgcagcactgcagtctttggttggccaaagcccggatttggttgtttttctgtctctagttgagagatgttggcaggatctttgtgaccaaatgttgatgatccgtggtatagccttgtttctggataggacatatgtgaagcaaactgcaaatgtccggtcattatgggacatgggcttacaacttttccgcaaacatctttcattgtctccggaagtagaacacaaaactgttacaggtcttctacgaatgattgaaagtgaaagaaaaggtgaagcagtggatagaactcttctaaaccatcttttgaagatgtttactgctctgggaatttatgcagaaagctttgagaagccattccttgaatgcacatctgaattttatgctgctgaaggcgtgaaatacatgcagcaatcagatgttccagattacttgaagcatgtggagataagattgcaagaagaacatgaaagatgtttgatctacttggatgcaagtactaggaagccattgatagcaacggcagaaaagcaacttcttgaacgtcatatacctgccattcttgataagggcttcgcaatgcttatggatgggaatcgtattgaagacctccagagaatgtacttactcttttcaagggtcaatgccctcgagtcactgaggctggccattagttcatacatcaggagaactggtcagggcattgttttggatgaggagaaagataaagatatggtttcatccctcttggaatttaaggcttctcttgacacaacatgggaagaaagcttttccaagaatgaagcattctgtaacaccattaaagattcatttgagcatctcatcaatcttcgtcagaaccggcctgcagagttgattgccaagtttttggatgagaaacttcgtgcaggtaacaaaggcacttcagaagaagagttggagggtacacttgataaagtcctggttttattcaggttcattcagggcaaggatgtgtttgaggcattttataagaaagatcttgcaaaaagactactgttaggaaagagtgcttctattgatgcagagaaatctatgatctccaagttgaagaccgagtgcggcagccagttcacaaacaaactagaagggatgtttaaggacattgaattatcaaaagaaataaacgagtccttcaagcagtcatcccaggctaggacaaaactcccatcagggattgaaatgagtgttcatgtcttgacaactgggtactggccgacatatccacccatggatgttagacttcctcatgaattgaatgtttaccaggatattttcaaagagttctatctaagcaaatatagtgggaggcgtctgatgtggcaaaattcattaggtcactgtgtcctaaaggcagagtttcctaaagggaaaaaggagttggctgtctccctatttcagactgttgttcttatgttattcaatgatgctgagaaactaagctttcaagatatcaaggactctactggtatagagggcaaggaattgagaaggactctgcaatcacttgcatgtggaaaagttcgtgtcctacaaaagttgccaaagggtagagatgtggaggatgatgactcatttgtttttaatgaagggtttacagctcctctttatcgtataaaggtgaatgcaattcagttgaaggagacagtggaggagaacacaagcaccacagaaagagttttccaagaccgtcagtatcaggttgatgctgctattgtgaggataatgaagactaggaaagtgcttagtcacacgcttcttattactgaactcttccaacagctcaaatttccaataaaaccagctgacttgaagaaaaggatcgaaagcctgattgacagggagtatctggagagagacaagaacaaccctcaaatatacaattacctggcatagtttattttcttaaatgatgtgggtaaagctcgatgtttaatcctttgtcatatatgtacagtaacaacggattctccccactcccctttatttttttcttttcctttcatttatggaccgttgtactgtaattgtaaagcatattctcccccttgaatttcttttcatttagttgagaattcaaaattgttcccaaaaatgatcgagaaattaaaaaggaattggtgattaac

SEQ ID NO: 1517 - DNA, 2923 bp, Cicer arietinum
aaatattagttaaaccgataccgattcctatccctagttatgtgtgtgcgccattctacggcatcatctgaaggctcgatctgggcttttttttattttatattttttgtattggatgcgaagtgcgaattgaattgacagagaaagagagaaacacaaaaacaaaatggtgtgttgagacgagtcgctaaactgagtttgatttcatttcatgtctctccccaccaaacgttctagcggcgctacttcaacctctatgaaaaaatttaagtctcattcccaacaacaacatcacgacgacgccgttttagacccttcttctctttccatgccgttagacgacgatctcaaatctaatgctcgttccgttatggctgctaatctctctcgcaagaaagctactcctcctcaaccccttaagaagcttctcatcaaattccacaaagctaaaccaacactacctactaattttgaggaggagacatgggcaaatctaaagtctgctatttgtgctatatttttgaagcaacctaactcttgtgagaaggagaatctttatcaggccgtgagtagtctttgcagttataaaatgggtggaaatctttatgaacggattgaaaaggagtgtgaagtacacatatcggcagcactgcagtctttggttggacaaagcccggatttggtcgtatttctttatctagttgagagatgttggcaggacctctgtgatcaaatgttgatgattcgtgatatagccttgtatctggataggacatatgtgaagcaaacaccaaatgtaaggtcattatgggacatgggcctacaacttttccgcaaacatctttcactgtctcctgaagttcaacataaaactgttactggtcttctacgattgattgaaagtgaaagattaggtgaagcagtggacagaactcttctaaaccatcttttgaagatgtttactgctctgggaatttatgcagaaagctttgagaagccattccttgaatgtacatctgagttttatgccactgaaggtgtaaaatacatgcagcaatcagatgttccagactacttgaagcatgtggagacaagattgcaagaggaacatgaaagatgtttgatatacttagatgcaagtactaagaagccattgatagcaacggcagaaaagcaacttcttgaacgtcatatacctgccattcttgataagggtttctctatgcttatggatggaaatcgtattgaagaccttcaaagaatgtactcactcttttcaagggtcaatgcccttgagtctctgagacaggcccttagttcatacatcaggaaaactgggcagggcattgttatggatgaggagaaagataaagacatggtttcatcccttcttgaatttaaggcttcacttgacttaacatgggaagaaagctttgtcaagaatgaagcattcagtaacaccattaaagatgcatttgagcatcttatcaatctccgtcagaaccgacctgcagagttgattgcgaaatttttggatgataaacttcgtgcgggtaataagggtacttcagaagaggaattagagggtacacttgataaagtcctggttttattcaggttcatccagggcaaggatgtgtttgaggcattttataagaaagatcttgctaaaagactactgttaggaaagagtgcttctattgacgcagagaaatccatgatctccaagttgaagactgagtgtggcagtcagtttacaaacaaactggaaggaatgtttaaggacattgaattatcaaaagaaataaatgagtcgttcaaacagtcatctcaggcgcgaacaaaactcccatcagggattgaaatgagtgttcatgtcttgactactgggtactggccaacatatccacccatggatgtcagacttcctcatgaattgaatgtttaccaggatatttttaaagagttctatctaagcaaatatagtggaagacgtctgatgtggcaaaattcattaggtcactgtgtcctaaaggcagactttcccaaaggaaaaaaggagttggctgtctcactatttcagactgttgttctgatgctattcaacgatgctgagaaattaagctttcaagatatgaaggactctactggtattgaggacaaggaactaagaaggactctgcaatcacttgcttgtggaaaagttcgtgtgctacaaaagatgccaaagggtagagatgtggacgatgatgactcgtttgtttttaatgatacatttaccgctcctctttaccgtataaaggtgaatgcaattcagttgaaggaaacagtggaggagaacacaagcaccactgaaagagttttccaagatcgacaatatcaggttgatgctgctattgtgaggataatgaagactaggaaagtgcttagtcacacacttcttattactgaactcttccaacagctcaaatttcctattaaaccagctgatttgaagaaaaggattgaaagcctgattgacagagagtatctggaaagggacaagggcaaccctcaagtatacaattatctggcatagtatattttacctcattttacatttcaaagtttctttttgttttttttttaaattttaaaatgacacgggaaaagcttgatgtttattccctagtcatatatatgtacagtaacaatggatcccaccctccccttttttaccctttcatttatcgacaacggtactgtaattgtaaagcatactttcctctttgaatttccttttattttcttgaaaattcaaagttattcccaaaaatgaccgagattccataatggaccctcatattataacaatggccttttccttcaactggttactgcacgtaaacaagcctccccttgtttcaccactgtgccttttacc

SEQ ID NO: 1518 - DNA, 2951 bp, Cajanus cajan
gccatctcaagccgcaagcgaagctttagcttgggtttcctttcctttcctcttagtttgggtgacaacacaaaaaaaaaagaaaaaaaaagaagaagaaaatacacataaacacaatggtgtgttgatcactctcgctctctctcttccatttgatgtctctccccaccaaacggtcgggcaccgctggttcctccccctcgccaccaccccctatgaaaaaggctaagtccctcctccgccccccttccgacgacgccgttttggacccttcctccatgcctctcgacgaagatctccccaatgcccgcgccgccaatctctcccgcaagaaagccacccctccccaacccgccaagaagctcctcatcaagctccacaaagctaaaccaacattgcccacaaattttgaggaggatacatgggcaaaactaaagtctgccatttgtgctatatttttgaagcaaccaaactcttgtgacttggagaagctttatcaggctgtgaatgatctctgcctttataaaatgggtggaaatctttatcaacggattgaaaaggagtgtgaagcgcatatatctgcggcacttcagtctttggttggccaaagcccagatttggttgtttttctgtctctagttgagagatgttggcaggatctttgtgaccaaatgttgatgattcgtggtatagccttgtatctggataggacatatgtgaagcaaacagcaaatgtacggtcattgtgggacatgggtttacaacttttccgcaaacatctttcattgtctccagaagttgaacacaaaactgtcactggtcttcttcgaatgattgaaagtgaaagaaaaggtgaagcagtggatagaactcttctaaaccatcttttgaagatgtttactgctctaggaatttatgcagaaagctttgagaagccattcctagaatgcacatctgaattttatgctgctgaaggtgtgaaatacatgcagcaatcagatgttccagattacttgaagcatgtggagacaagattgcaagaagaacatgacagatgtttgatctacttggatgcaagtactaggaagccattgatagcaacggcagaaaagcaacttcttgaacgtcatatacctgccattcttgataagggctttgctatgcttatggatgggaatcgtattgaagaccttcagagaatgtactcgctcttttcaagggtcaatgcccttgagtcactgaggcaggccattagttcatacatcaggagaactggtcagggcattgtcttggatgaggagaaagataaagatatggtttcagcccttctggaatttaaggcttctcttgacacaacatgggaagaaagctttttcaagaatgaagcattctgtaacaccattaaagattcatttgagcatcttatcaatcttcgtcagaaccgacctgccgagttgattgccaaatttttggatgagaagcttcgtgcaggtaataagggcacttcagaagaagagttggagggtacacttgataaagtcctggttttattcaggttcattcagggcaaggatgtgtttgaggcattttataagaaagatcttgcaaagagactgttgttaggaaaaagtgcttctattgatgcagagaaatctatgatctccaagttgaagaccgagtgtggcagccagttcacaaacaaacttgaagggatgtttaaggacattgaattatcaaaagaaataaacgaatcgttcaaacagtcatcccaggctaggacaaaactcccatcagggattgaaatgagtgttcatgtcttgacaactgggtactggccaacatatccacccatggatgttagacttcctcatgaattgaacgtttaccaggatattttcaaagagttctacctaagcaaatacagtggaaggcgtctgatgtggcaaaattcattaggtcactgtgtcttaaaggcagagtttcctaaagggaaaaaggagctggctgtctccctatttcagactgttgttctgatgttattcaatgatgctgagaaactaagctttcaagatattaaggactctactagtattgaggacaaggaacttagaaggactttgcaatcacttgcctgtggaaaagttcgtgtcctgcaaaagttgccaaagggtagagatgtggaggatgatgactcatttgtttttaatgatggctttacagctcctctttaccgtattaaggtgaatgcaattcagttgaaggagacagtagaggagaacacaagcaccactgaaagagttttccaagaccgccagtatcaggttgatgctgctattgtgaggataatgaagactaggaaattgcttagtcataccattcttattactgaactcttccaacagctcaaatttccaataaaaccagctgacttgaagaaaaggatcgaaagccttattgacagggagtatctggagagggacaagaacaaccctcaagtatacaattacctggcatagtttattttacctcatttcatatttttaagtttcttttcttaaatgacgtgggtaaagttcgatgtttacttgaatcgaaaaaaaaagctcgatatttactccctcgtcatatatgtacagtaacaacggattctctctgccctccaccatttttcttttcctttcatttatggacaactgtactttaattgtaaaccatattctcccccttgaatttcttttcgtttagttgaaattcaaaattgttcccgaaaatgatcgagaaattcaaaaagaattgatgactaacaaggtaggcttcttctcaaggacaggtcatatttttctttttacctatacattactttttttgttcctcaatctgtatactttgagaactccgggattattttgttcattgttccagaagttgcagaaaatgtgcatattttctat

SEQ ID NO: 1519 - DNA, 2741 bp, Phaseolus vulgaris
gtgcgtgtgtttgtttgtttattttccctttcccttgctctcctctatagtttgggtgacaacacaaacacaaacgcaaataaacacaatggtgtgttgatcactctctctctcttctctcttcctctctctccatttgatgtctctccccaccaaacggtcgggcaccgctggttcctccccgtcgccgccaccccctatgaaaaaggccaagtcgcttctcctccgcgccccctccgacgacgccgttttggactcttcccccatgcctctcgacgacgatctccccaatgcccgcgccgccaatctctcccgcaagaaagccaccccgccccagcccgccaagaagctcctcatcaagctccacaaagctaagccaacattgcccacgaattttgaggaggatacatgggcaaaactaaagtctgccatttgtgctatatttttgaagcaaccaaactcttgtgacttggagaagctttatcaggctgtgaatgatctatgcctttataaaatgggtggaaatctttatcaaagaatagaaaaggagtgtgaatcacatatatctgcagcgctgcagtctttggttggccaaagcccagatttggttgttttcctgtctctagttgagagatgttggcaggatctttgtgaccaaatgttgatgattcgtggtatagccttgtatctggataggacgtatgtgaaacaaacggcaaatgtccggtcattatgggacatgggcttacaacttttccgcaaacatctttcattgtctcctgaagtagaacacaaaactgttactggtcttcttcgaatgattgaaagtgaaagaaaaggtgaagcagtggatagaacccttctaaaccatcttttaaagatgtttactgctctgggaatttatgcagaaagctttgagaagccattccttgaatgcacatctgaattttatgctgctgaaggtgtaaaatacatgcagcaatcagatgttccagattatttgaagcatgtggagataagattgcaagaagaacatgaaagatgtttgatctacttggatgcaagtactaggaagccattgatagcaacagcagaaaaacaacttcttgaacgtcatatacctgccattcttgataagggcttcgcaatgcttatggatgggaatcgtattgaagaccttcagagaatgtattcactctttttaagggtcaatgcccttgagtcactgaggcaggcaattagttcatacatcaggagaactggtcagggcattgttatggacgaggagaaagataaagatatggtttcatcccttttggaatttaaggcttctcttgacacaacatgggaagaaagtttttccaagaatgaagcattctgtaacaccatcaaagattcatttgagtatctcatcaatcttcgtcagaaccgacctgccgagttgattgccaagtttttagatgagaaactccgtgcaggtaacaagggaacttcagaagaagagttagagggcacacttgataaagtcctggttttattcaggttcatacagggcaaggatgtgtttgaggcattttataagaaagatcttgcaaaaagactgctgttaggaaagagtgcttctattgatgccgagaaatctatgatctccaagttgaagactgagtgtggcagccagttcactaacaaactagaagggatgtttaaggacattgaattatcaaaagaaataaacgagtccttcaaacagtcatcccaggctaggacaaaactcccatcagggattgaaatgagtgttcatgtcttgacaactgggtactggccaacatatccacccatggatgttagacttcctcatgaattgaacgtttaccaggatattttcaaagagttctatctaagcaaatacagtggaagacgcctgatgtggcaaaattcattaggtcactgtgtcttaaaggcagagtttcctaaagggaaaaaagagctggctgtctccctatttcagactgttgttctgatgttattcaatgatgctgagaaactaagttttcaagatataaaggactctactagtattgaggacaaggaacttagaaggactctgcaatcacttgcctgtgggaaagttcgtgtcctacaaaagttgccaaagggtagagatgtggaggatgatgactcatttgtttttaatgaaggatttgcagctcctctgtaccgtataaaggtgaatgcaattcagttgaaggagacggtggaggagaacacaagcaccactgaaagagttttccaagaccgtcagtatcaggttgatgctgctattgtgaggataatgaagactaggaaagtgcttagtcatacccttcttattaccgaactctttcaacagctaaaatttccaataaaaccagcggacttgaagaaaaggatcgaaagcctgattgacagggagtatctggagagggacaagaacaatcctcaaatatacaattatctggcatagtttattttacttcatttcacattttgaagtttcttttgtttaatgacccttgtcatatatgtacagtaacgacggattctctccactcctctatttttctttcccttcatttatggacaactgtactttaattgtaaagcatattctaccccttgaatttcttttcatttagatcaaaattcaaaattcttccaggaaatgatacagaaattcaaaagaattggtcattaacaacctt

SEQ ID NO: 1520 - DNA, 2534 bp, Trifolium pratense
tcttctctcgaccacgatctcaaacctaatcctctttcttcctctaactccatggctgctaatctctctcgcaagaaagctactcctcctcaaccttctcaacccgctaaaaaattactcatcaagctcaccaaaggtaagccaaagatacctcctaattttgaggagcagacatgggcaacactaaagtctgctatatgtgctatattttttaagcaacctaactcctgtgacttggagaagctttatcaggccgtcgaagatctttgcattcataaaatgggtggaaatctttatcaacggattgaaaaggagtgtgaagtacacatatctgcagcactgcagtctttggtcggacaaagcccggatttggttgtatttctatctctagttgaaagatgttggcaggatcattgtgatcaaatgctgatgattcgtgatatagccttgtttctggataggacatatgtgaagcaaaattcaagtatacggtcattatgggacatgggcctacaactttttcggaaacatctttcactgtctcctgaagttcaacacaaaactgttactggtcttctacgaatgatcgacagtgaaagattaggggaagcagtggatagaactcttctaaatcatcttttaaagatgtttactgctttgggaatttatgcagaaagctttgagaagccattccttgattgtacatctgaattttatgccgctgaaggtgtgaaatacatgcagcaatcagatgttccagattacttgaagcatgtggagacaagattgcaagaggaacatgaaagatgtttgatctacttggatgcaagtactaagaagtcattgatacaaacaacagaagcacaacttcttgaacgtcatatacctgccattcttgataagggtttctctgtgcttatggatggaaatcgtattgaagaccttcaaagaatgcactcactcttttcaagggtcaatgccctcgagtcactgaagcaggcccttagttcatacatcaggagaactgggcagggcattgttatggatgaggagaaagacaaagacatggttcaatcccttcttgaatttaaggctgctcttgacacaacatgggaagaaagctttgccaagaatgaagcattcggtaacaccattaaagatgcatttgagcatcttatcaatctccgtcagaaccgacctgcagagttaattgccaagtttttggatgataaacttcgtgcgggtaataagggtacttcagaagaggaattagagggcactcttgataaagtcctggttttattcaggttcattcagggtaaggatgtgtttgaggcattttataagaaagatcttgctaaaagactactgttaggaaagagtgcttctattgacgcggagaaatccatgatctccaagttgaagactgagtgtggtagccagtttacaaacaaactggaaggaatgtttaaggacattgaattatcaaaagaaataaacgagtccttcagacagtcatcccaggcgagaacaaaactcccatctgggattgaaatgagtgttcatgtcttgactactgggtactggccaacctatccacccatggatgtcagacttcctcatgaattaaatgtttatcaggatatttttaaagagttctatttaagcaaatacagtggaaggcgtctcatgtggcaaaattctttaggtcactgtgtcctaaaggcagattttccgaaagggaaaaaggaattggctgtctccctatttcagactgttgttctgatgcaattcaatgatgctgagaaactaagctttcaagatatcaaggattctactgctattgaagacaaggaactgagaaggactctgcaatcacttgcatgtggaaaagttcgtgttctgcaaaagatgccaaagggtagagatgttgaagatgaagattcgtttgtttttaatgatacatttaccgcccctctttaccgtataaaggtgaatgcaattcagttgaaggagacagtggaggagaacacaaacaccacagaaagagttttccaagatcgtcaatatcaggttgatgctgctattgtgaggataatgaagactaggaaagtgcttagtcacacacttcttattactgaacttttccaacagctcaaatttcctattaaaccagctgatttgaagaaaaggattgaaagcctgatcgacagagagtatctggagagggacaagagcaaccctcaagtatacaattacttggcatagtatattttaccttattttacatttcaaagtttttttttttaattgatatgggagaagcttaatgttattccattgtcatatatgtacagtaacaacggatcccttccctttcttgtcaaaaaaaaaaaaaaacggatcccttccctttttttgtcctttcatttatcgacaactgtactgtaattgtaaagtatatgttttccatcttttgaatttcctttcattttcttgaaaattaaatattgttccactaaattatcgagatt

SEQ ID NO: 1521 - DNA, 2863 bp, Lupinus angustifolius
gaggctttcacttttggagcttctacatctttgggtgttttactctcaacacaacacaatgctcttttaatcactttcatgtctcttcccacaaaacgttcatccaccacttcttcttcttcttcttcttccgccgccgctgccgccaccgtcaacaaccctatgaaaaaggccaagccccacgctcctttacacgacgccgtttttgatccttcatctatggccatcgacgacgatctcaaaccttctctcaacgaatctaacgccccctctcgcggcctcgtcgccgccaatctcgctcgcaagaaatctacccctcctcagcccgctaagaagctccttatcaagcttcacaaagctaaaccaacattacccacaaattttgaggaggatacatgggcaaaattgaagtctgctatttgtgctatattcttgaagcaacctgattcttgtgacttggagctgctttatcaggctgtgagtgatctttgcctttataaaatgggtggaaatctctatcaacggattgaaaaggaatgtgaagcacacatatctgcagcactgcagtctttggttggccaaagtccggatttagttgtttttctatctctagttgagagatgttggcaggatctttgtgaccaaatgttgatgattcgcggtatagccttgtatctggatagaacatatgtgaagcaaacacccaatgtacggtcattatgggacatgggcttacaacttttccgcaaacacctttcattatcttctgaagtagaacacaaaactgttaccggtcttttacgaatgattgaaagtgaaagattaggtgaagcagtggacagaactcttctaaatcatcttttgaagatgtttactgcactgggaatttatgcagaaagctttgagaagccattccttgaatgcacatctgaattttatgctgctgaaggtatgaaatacatgcagcaatcagacgttccagattacttgaagcatgttgagacaagattgcaagaggaacatgaaagatgcttgctctacttggatgcaagtactaggaagccgttgatagcaacaacagaaaagcaacttcttgaacgtcatatacctgctattcttgataagggtttctctatgcttatggatgggaatcgtattgaagaccttcagagaatatactcactcttttcaaggatcagtgcacttgaatcactgaggcaggcccttagttcatatatcaggaaaactgggcagggcattgttatggatgaagagaaagaaaaagatatggtttcatcccttctggattttaaggcttctcttgatacaatatgggaagaaagctttttcaagaatgaagctttcagtaacaccattaaagaagcatttgagcatcttatcaatcttcgccagaatcgaccggctgagttgattgccaagtttttggatgagaagcttcgtgcaggtaacaagggtacttctgaagaagaattggagggtatgcttgataaagtcctggttttattcaggttcattcagggcaaggatgtgtttgaagcattctataagaaagatcttgcaaaaagactgcttttaggaaagagtgcttctattgatgcagagaaatctatgatctccaagttgaagactgagtgtggcagccagttcacaaacaaactggaagggatgtttaaggacattgaattatcaagagagataaatgattccttcaaacagtcatcccaggcaaggtcaaaactcccatcagggatcgaaatgagtgttcatgtcttgacgacggggtactggccaacatatccacccatggatgttagacatcctcatgaattaaatgtttaccaggacattttcaaagagttctatctaagcaaatatagtggaaggcgtctgatgtggcaaaattcattaggtcattgtgtcttaaaagctgagtttcctaaagggaaaaaggagttggctgtttccctttttcagactgttgttctgatgctattcaatgatgctgaaaagctaagctttcaagatatcaaagactctactagtattgaggacaaggaactgagaaggactctgcaatcccttgcatgtggaaaagttcgtgtactacaaaagtttccaaagagtagagatgtggaggataatgactcatttgtatttaatgaagggttcacagcgcctctttatcgtataaaggtgaatgctattcagttgaaggagacagtggaggagaacacaagcaccacagaaagagttttccaagaccgtcaatatcagattgatgctgctattgtgaggataatgaagaccaggaaagtgcttagtcacacccttcttattactgaactcttccaacagcttaaatttccaataaaaccagctgatttgaagaaaaggattgaaagcctgattgacagagagtacctggagagggacaaaagcaatcctcaaatatacaattatttggcatagtatgttttacctaatctctcatttttaatttcttctttaaaatgacctaggagatacttgattttgagtccctttgtcatatgtacagtaactatggaaccccctccctcatctatttctcttacatttatagactactgcactttcttgtaaagcatagttttcctttgaattttttccattttcttgaaagttccaaattgatccagatttttttttataaaaatggctgttgtttaccaagggaggaatgtttttttctctacccaatgtttgagattataagggcttttgtgttcattttccccttaaaattattagatcattattatatatgttgtaattttgcagtatggtgtgattgtcagttgtg

SEQ ID NO: 1522 - DNA, 2865 bp, Lupinus angustifolius
actcttctcatctcatgacccaagtctccgcatgatgtgaattaatccgaaggatttcacttttggagtttcttctttgatgtttcactctcgacacaatacaaacaatacaatgctctactaatcactttcatgtctctccccactaaacgctcatccaccatttcctcctcttcctccgacgccgccgccaccaatcctatgaaaaaggccaagtcccacggccccttagacgacaccgttttcaacccttcctccatggccatcgacaacgatctcaaaccctcctccgatgacgccaccactgccgtcccctctcgcggactcatcgctgccaatctcgctcggaaaaaagctactcctcctcagccccctaagaagctccttatcaagctccacaaagctaaaccaacattacccacaaattttgaggaggatacatgggcaaaattgaagtctgctatttgtgctatattcttgaagcagcccgattcttgtgacttggaactgctttatcaggctgtgagtgatctttgcctttataaaatgggtggaaatctttatctacggattgaaaaggaatgtgaagcacacatatctgcagcattgcagtctttgattggccaaagtccagatttagttgtttttctatctctagttgagaggtgttggcgggatctttgtgatcaaatgttgatgattcgtggtatagccttgtatctggataggacatacgtgaagcaaacacccaatgtacggtcattatgggacatgggcttgcaacttttccgcaagcatctttcattatcttctgaagtagagcacaaaactgttactggccttctacgaatgattgagagtgaaagattaggtgaaacagtggacagaattcttctaaaccatcttttgaagatgtttactgcactgggaatttatgcagaaagctttgagaagccattccttgaatgcacatctgaattttatgctgctgaaggtatgaaatacatgcagcaatcagatgttccagattacttgaagcatgtggagacaagattgcaagaggaacatgaaagatgtttgatctacttggatgcaactactaggaagccattgatagcaacagctgaaaatcaacttcttgaacgtcatatacctgccattcttgataagggtttccctatgcttatggatggaaatcgtattgaagaccttcagagaatgtactcactcttttcaagggtcaatgcccttgagtcactgaggcaggcccttagttcatatatcaggaaaactgggcagggcattgttatggatgaagagaaagataaagatatggtttcatcccttctggattttaaggcttctcttgatacaatatgggaagaaagcttttccaagaatgaagcattcagtaacaccattaaagaagcatttgagcatcttatcaatctccgtcagaatcgaccggcagagttaattgccaaatttttggatgagaagcttcgtgcaggtaacaagggtacttctgaagaagaattggagggtatgcttgataaagtcctggttttgttcaggtttattcagggcaaggatgtgtttgaggcattctataagaaagatcttgcaaaaagattgcttttaggaaagagtgcttctattgatgcagagaaatctatgatctccaagttgaagactgagtgtggcagccagttcacaaacaaactagaaggaatgtttaaggatattgaattatcaaaagagataaatgagtccttcaaacaatcatcccaggcaaggacaaaactcccatctgggatcgaattgagtgttcatgtcttgactacagggtattggccaacttatccacccatggatgttagacttcctcatgaattgaatgtttaccaggatattttcaaagagttctatctaagcaaatatagtggaaggcgtctgatgtggcaaaattcgttaggtcactgtgtcttaaaagctgagtttcctaaagggaaaaaggaattggctgtctccctatttcagaccgttgttctgatgctattcaatgatgctgaaaaattaagttttcaagatatcaaagactctactagtattgaggacaaggaattaagaaggactctgcaatcacttgcatgtggaaaagttcgtgtactacaaaagtttccaaagagtagagatgtcgatgatgatgactcatttgtatttaatgaagggttcgcagctcctctttaccgtataaaggtgaatgcaattcagttgaaggagacagtggaagagaacacaagcaccaccgaaagagttttccaagaccgtcaatatcaggttgatgctgctattgtgaggattatgaagaccaggaaagtacttagtcacacccttcttattactgaactcttccaacagcttaaatttccaataaaaccagcggatttgaagaaaaggattgaaagtctgattgacagagagtatctggagagggacaagagcaatcctcaaatatacaattacttagcataagattgtttacctcgtctcacctttttaatttcttcttttaaaatgacatgggacaagcttcatgttatgtcccttgtcaaatgtacagcaactatggaatcccttcttccctcaaatttactcttacatttatcgactaatgtaccttttttttttgtaagtcatatttctcctttaattttttttcattttcttgaaagttccaaattgtttcccaaaattgttctgaattaaaaaaagaaattggcagtttactgatgtaggattcttctttctctaccccaggggtttgtggtgatagtttattattattattgttatttagagtga

SEQ ID NO: 1523 - DNA, 3795 bp, Theobroma cacao
gtgattataaaaagtgttgacaaggtcatcgggatcaaaagtttttaagtgattattatctgaacaaaaaacaaaattttgaagttattgtatccaattggattactatttctttcgggaatatttgaagtttagcccaaataaactatgggctacacaactttaccctattttaacattttgaataaaatatttggtttgtgatgggcctcctaaagctgggccagccctcaaatgagcctaaaggcaaagtagcccaatgcgccgaataatgaagaaagagaaacacgttttgctcaaataaaaaacaagaaaaaaaagaaaaacctacaaaaaattaacatttcttctctgtgttgatctctccttctctcactctcacaagtatttatctttttgctgccttctcaaatcatccccattctctctctaaaaagggggaggcaagcacactgtaataggcggaaccaaaacggagaaagaaaaaaagaagctaaaattttctacaatgctctcttgattactttcatgtctctcccccctaccaaacgctctctgagcaacgctaattccaacgccactgcttcttcttcttcctcctcttctcctcacttccaaccatcaatgaagaaagccaagtcccaagccgtcgcttgctctctagacccaaacaagaacggccttcaccaccaccacaaccaagacgataacgacgtcgttttcgacccttcatctatggccctcgacgatgattccaagcccgacgatgctcgtgctcccgccgccgctaatttgtctcgcaaaaaagcaaccccccctcaacccgccaagaagcttgtcatcaaactcgttaaagcaaaaccgacattgcccacaaattttgaggaggaaacatgggcaaagctgaagtcagccataaatgctatatttttgaaacaaccagattcttgtgacttggagaagctttatcaggctgtcaataatctttgcctgcacaagatgggaggaagcctttatcaacgaattgaaaaagagtgtgaagaacatatatctgcggcattaagatctttagttgggcaaagcccagatctggtggttttcttatcacttgttgagaaatgttggcaagatctttgtgatcaaatgttgatgattcgcggtatagccttgtatctagacagaacatatgttaaacaaaccccaaatgtacgttcattgtgggacatgggcttgcagctcttccggaaacatctatcgcttgcttctgaagttgagcacaaaactgtcactggtcttttaagaatgattgagagtgagagattaggtgaagcagttgagaggacgctccttaaccatcttttgaagatgtttactgctttaggtatttactcagaaagctttgagaagccattcctggagtgcacatctgagttttatgcagctgaaggaatgaaatacatgcagcaatctgatgttccagattacctgaagcatgtggagatgaggttacatgaagaacatgaaagatgcttactctacctggatgctcttacaagaaagccacttatagcaacagcagagaggcaacttcttgaacgtcatatacctgccattcttgataagggatttatgatgctgatggatgggcatcgtattgaggaccttcagaggatgtactcactattttcaagggtcaatgctcttgaatcactcaggcaggccctaagctcatatattcggagaactgggcagggcattgtcttggatgaagagaaagacaaggacatggtgccttccttgttagaattcaaggcttcacttgactcgatatgggaagaaagcttttccaagaatgaggcattttgcaatactatcaaggatgcatttgagcatctaattaaccttcgtcagaatcgacctgctgagctgattgcaaagtttttggatgaaaaactccgtgctggtaataagggtacttctgaagaggaattagagggtacacttgataaagttttggttttatttaggttcatccagggcaaggatgtctttgaagcattctataagaaggatcttgcaaaacggctgctgttaggaaagagtgcttctattgatgcggagaaatccatgatttctaagctgaagactgagtgtggcagccagtttacaaacaaacttgaaggaatgtttaaggatattgaactatcaaaggagataaatgaatcattcaagcagtcatcccaggcccggataaaacttccatcaggaattgagatgagtgtccatgtcttaacaacagggtactggcccacatatccacctatggatgttaggcttcctcatgaattgaatgtctatcaggacatctttaaggaattctacttaagcaagtacagtgggaggcgcctaatgtggcaaaattcattaggtcattgtgtgttgaaagcagattttcctaaaggtaaaaaggagctggcagtttccctatttcagactgtagttctgatgttgttcaacgatgcccaaaagcttagctttcaagacattaaggactccactggcatagaggataaggaattgagaaggaccttgcagtcccttgcttgtggcaaagtacgagtccttcaaaagttgccaaaagggagggacgtggaggatgatgattcattcgttttcaatgagggatttactgctcctctctatcgtttaaaggtaaatgcaatccagatgaaagagacagttgaggagaacacaagcactactgaaagagtatttcaagaccgtcaatatcaggttgatgctgctattgttcggataatgaagacgaggaaagtgttgagtcacactcttctgataactgaactcttccaacagcttaagtttcccataaaaccggctgatttgaagaaaagaatcgagtctctcattgacagggagtacctggagcgggacaagaacaacccacagatatacaattacctggcatagtttacctttttttttttttttttttttttggccttttgatgatagatatccccttgtaaatgacacgggaaactctggtattctccaagaggcaggacgccgaaatcccttgtcagatccatgtacagtaacttgtagtatttgttttgttgcaattgagattgtaattgtaaagcatatttagcctctgtttttgatacttgttacggacttaacacttgagttacctgaaataagctgcattatttatttcttgggtcgtttgtgtgtgttttcatgttttttttttatatggtaaaaaaggagggtgtagccgtatgaggctgcagcagcttgcaggggtaatagctgacaagggtttcgacaattgcttttcagaaacacatcagattggttgggggaactggaaggatgggttacgccagcctctcaataaggaaggtgtattaccattttacttggttatgatctttgctcataagcccaagaatctgtggcatgaccatggtttaacagccaacaaatcaatcatcataaaatattagaatcagtcgggtttgtttatttttttacagggctatgggaagcagtctcgaacatggtacattggtaccactgggccttgttagagattcgagattggactttgttggagctgaacaactactagtgtaaaattaaattaaaatcttgtatgaattcgaataatctctggagttgagttactatttgattggttcacaccagacccgacaacggtctctttctacgatgtcgtcattcaacttttacaatgtataaaaaaac

SEQ ID NO: 1524 - DNA, 2468 bp, Arachis hypogaea
ggggtagcccatatcgcatatctctccctccccctcccccaacaaccctcgcgctcccgccgccaacctttcccgcaagaaagccacgcctccccaccccgctaagaagctcctcatcaagctccacaaaggtaagccaacactgcccacaaattttgaggaggttacatgggcaaaattgaagtctgctatttgtgctatattcttgaagcaacctgactcttgtgatttggaaaagctttatcaggctgtcagtgatctttgcatatataaaatggctggaaatctttatcagcgaattgaaacggaatgcgaagcacatatatctacagctttgcagtctttggttggtcaaagcccagatttggttgtttttctatctctagttgagagatgttggcaggatctttgtgaccaaatgttgatgattcggggtatagccttgtatctggataggacatatgtgaagcaaacagcaaatgtacggtccttatgggacatgggcttacaacttttccgcaaacatctttcattatctcctgaagttgaacacaaaactgttactggtcttctaagaatgattgaaagtgaaagattaggtgaagcagtggatagaacgcttctaaaccatcttttgaagatgttcacagcactgggaatatatgcagaaagcttcgagaagccatttcttgaatgcacatctgaattttatgctgctgaaggtatgaaatacatgcagcaatcagatgttccagattatttgaagcatgtggagacaagattgcaagaggaacacgacagatgcctgatctacttggatgcgagtactaggaagccgctgatagccacagcagaaaagcaacttcttgaacgtcatatacctgccattcttgataagggtttctctgtgcttatggatggaaatcgcattgaagaccttcagagaatgtactcactctttttaagggtcaatgcccttgagtcactaagacaagccctaagttcatatatcaggagaactgggcaggccattgttatggatgaggagaaagataaagacatggtttcttcacttctggagtttaaggcttctcttgacagaatatgggaagaaagtttttataagaatgaagtattctctaacaccattaaagattcatttgagcatcttatcaatctacgacagaaccgaccagcagagttgattgccaagttcttagatgagaagctccgtgcaggtaacaagggtacttctgaagaggaactggagggaacacttgataaagtcctggttttatttaggttcattcagggcaaagatgtgtttgaagctttttataagaaagatcttgcaaaaagacttcttttgggaaaaagtgcttctattgatgcagagaagtctatgatatccaagttgaagactgagtgtggcagtcagttcacaaacaaattggaaggaatgtttaaggacattgaattatcaaaagaaataaatgagtccttcaaacagtcatcccaagcaaggacaaaactcccatcaggaattgaaatgagtgttcatgtcctgacaactgggtactggccaacatatccacccatggatgttagacttcctcatgaattgaatgtttaccaggatattttcaaagagttctatcttagcaaatacagtggaaggcgtttgatgtggcaaaattcattaggtcactgtgtcttgaaggcagagtttcctaaagggaaaaaggagttggcagtctccctatttcagactgttgttttgatgctattcaatgatgccgagaaactgagctttcaagatatcaaggactctaccagtatcgaggacaaagaactgagaaggactctgcaatcacttgcatgtggaaaagttcgtgtcctacagaagtcgccgaagggtagagatgtggaggatgatgactcattctcttttaatgatggctttacagctcctctttaccgtataaaggtgaatgccattcagttgaaggagacagtggaggaaaacacaagcaccactgaaagagttttccaagaccgtcagtatcagattgatgctgccattgtgaggataatgaagacaaggaaagtacttagtcacacccttcttattaccgaactcttccaacagctcaagtttccaataaaaccagctgatttgaagaaaaggattgaaagcctgattgacagagagtatctggagagggacaagagcaacccccaaatatacaattatctggcatagtctttcacattttcaaatgacgtggggcaaacttaatgtttgatccttcgtcatatgtacagtaacagtggattcccgttctttttttccacccccattcatcgacaactgtactttattattgtaaagcataatatctcgcatgataatttttccttttatagaagattctgggcgacccaaagttattctccaaaaaaaaaag

SEQ ID NO: 1525 - DNA, 3183 bp, Glycine max
tttatttataaatttaaattttttaaaaataattattttaaaaattaagaagatgaagaaaaaagattctggaatgatttattgtttattcatttataaaaaaaaattctgaaatgatttatttttcattcaaccttttatattttaatttaaagcaaaataaaagaaaaaagcgaaaataaatatataaaaatagatttaaaaatgagaactgtgtgtgagtctgattttgtaatcttcttttcatcatcgtctcaactctctctctctctctcaaactcttcttctgtttagcttcactcactcaatgcgttgttgttgttgatgtctaatacgaaactgtcaccgcctatgaagaaggcgaaatctatcgactccaagaacgacgacgccgttttgaaatcccccgccgccgcttccgatgaccccaatgcgcccgctctcgtcgccgccaatctgtctcgcaaaaaagccactcctccccatccccccaagaagctcctcattaagttccacaaaggtataccaacattgcccccaaattttgaggaggatacatgggcaaaattgaagtcagctattggtgctatattcttgaagcaacctgtttcttgtgacttggagaatctttatcaggctgtgaatgatctttgcctttacaaaatggggggaaatctttatcaacgaattgaaaaggagtgtgaagcacatatatctgcagcactgcagtctttagttggccaaagcccagatttgattgtttttctatcgctagttgagagatgttggcaggatctttgtgaccaaatgttgatgattcgtggtatagccttgtttctggataggacgtatgtgaaacaaacaacaaatgtacagtcattatgggacatgggtttgcaacttttctgcaaatatctttctctatctccagaagtagaacataaaactgttactggtcttcttcgtatgatcggaagtgaaagatcaggtgaatcagtggatagaactcttctaaatcatcttttgaagatgtttactgctctgggaatttatgcagaaacctttgagaagccattccttgagtgcacatccgaattttatgctgctgaaggtatgaaatacatgcagcaatcagatgctccagattacttgaagcatgttgagacaagattgcaagaggaacatgaaagatgtttgttgtacttggatgcaagtactaggaaaccattgatagcaactgcggaaaagcaacttcttgaacgtcatatacctgccattcttgataagggttttactgtgcttatggatgggaatcgtattgaagaccttcagagaatgcactcgctcttttcaagggtcaatgctcttgaatcactgaagcaggcccttagttcatacatcaggagaactgggcagggcattgttatggatgaggagaaagataaagatatggtctcatcccttcttgaatttaaggcttctcttgacacaatatgggaagaaagctttttcaagaatgaagctttcagcaattcaattaaagatgcatttgagtatcttatcaatcttcgtcagaaccgacctgcagagttgattgccaagtttttggatgagaagcttcgtgcaggtaataagggtacttctgaagaggaactggaggctacacttgataaagtcctggtgttattcaggttcattcagggcaaggatgtatttgaagcattctataagaaagatcttgctaaaagactgcttttaggaaagagtgcttctattgacgctgagaaatctatgatctccaagttgaagactgagtgtggcagccagttcacaaacaaactggaaggaatgtttaaggacattgaattatcaaaagaaataaatgattcattcaaacagtcatcacaggcgaggtcaaaacttgcatcagggattgaaatgagtgttcatgttttaactacagggcactggccaacatatccgcccatggatgttagacttcctcatgaattgaatgtttaccaggatattttcaaagagttctatctaagcaaatacagtggaagacgtctgatgtggcaaaattcactaggtcattgtgtcttgaaggcagagtttcccaaaggaagaaaggagttggctgtgtccctatttcagactgttgttctaatgttattcaatgatgctgagaagctaagtcttcaagatatcaaagatgctactggtattgaggacaaggaactcagaaggactctgcaatcactagcttgtggtaaagttcgtgtcctacaaaagatgcccaaaggaagagatgtggaggacgatgacttatttgtttttaatgatgggtttacagctcctctttaccgtataaaggtgaatgcaattcaattgaaggagacagtcgaggagaacacaagcaccaccgaaagagttttccatgaccgtcaatatcagattgatgctgctattgtgaggataatgaagactagaaaagtgcttagtcacacccttcttattactgaactcttccaacagctgaaattcccaataaaaccagctgatttgaaaaaaaggattgaaagcctcattgacagggagtatctagagagggacaagagcaatcctcaaatatacaattacctcgcataacattttctgctttattttacatttaaattttcttttgtaaatgacatgggagagggtttgatgtttaatcccttgtcatatgtacagtaagcatgaatgattccttttttgatattttccaccctttcattgacgggaactgtactgtaattataaaacatgtttattctcttttaagttttactattttcttccaattagaagttactgacccaaacccatacacaaacatttggataaaatttaatgataaatattagaagttattagtcacattaccacttaaagtcgtgcatttatttttttaatttactattcaactataatataatgtttttatttttattgtttttttctactcataattacataggttttattatttgagtaactctaaagaattaatcgtttttttcccaattttttcacaaagtattctttattcttatttgctgtattagtaaatacaagagtttaaacttatcaaagtaatgattgcattaagattggggcatgatgataagtgagtag

SEQ ID NO: 1526 - DNA, 2868 bp, Citrus sinensis
ctcgcgtacaggaggagcggggaggaggatatctaaaaatctaaatagatatcaaatcttcttcattttttcacttctgcgtgcgtgtgcttttttcccccccttttttttttttttttcaatttgcagtgagtgaattaaaaatgcactaataaacgacctatttcatgtctctccccaacaaacgcacagccagcaacaacaacagcaacaattattcaccttcggcaatgaagaaggccaagtcccaagccgtggcctgctctgtggacaccgccaacaagaacggtctccaccacgacaacgacgccgttttcgatccctcttctatttctctcgatgacgatcttaagcccgacgaaccccgacaacaagccgccgccaatttatcccgcaaaaaagcccagccccctcagcccgccaaaaaacttgtcatcaagctcctcaaagctaaacccacactgcctacaaattttgaggaggatacatgggcaaagctgaagttagctataaaagcaatattcttgaaacaaccaacttcctgtgatttggaaaagctatatcaggctgtcaatgatctttgcctgcacaagatggggggaaacctttatcagcgaattgaaaaggagtgtgaagaacatatatctgctgcaattcgatcgttggtcggtcaaagccctgacttggtggttttcttatcactggttgagagatgctggcaggatctttgtgatcagatgttgatgattcgtggtatagctttgtatctagatagaacatatgtgaaacaaacaccaaatgtgcgttcattgtgggacatgggattgcagcttttccggaaatatctttcttcatattcagaagttgagcacaaaactgtcactggtcttttaaggatgattgagagggaaagattaggtgaagctgttgataggacactccttaatcatctattgaagatgttcaccgctctgggaatttactcagaaagctttgagaaaccatttcttgagtgcacgtcggagttttatgccgccgaaggcatgaaatacatgcagcaatcagatgttccagattacttgaagcacgtggagataaggttgcatgaagaacatgaaagatgtttactataccttgatgtaagcacaagaaagccacttatagcaactgccgaaaggcaacttcttgaacgacatatatctgcaattctcgacaaggggttcacaatgctgatggatggccatcgtactgaggacctacagaggatgtactcactattttcaagggtcaatgctctcgaatcattaaggcaggcccttgctatgtacattcgtagaactgggcatggcattgtcatggatgaagagaaagataaagatatggtttcgtctcttttggagttcaaggcttctcttgatacaatatgggaacaaagcttctcaaagaatgaagcattttgcaacacaataaaggacgcatttgagtatctaattaatcttcgtcagaaccgacctgctgagctgattgcaaagtttctggatgagaagcttcgggctggaaataagggtacttcagaagaggaattggagggtacacttgataaagttctggttttattcaggtttattcagggtaaagatgtgtttgaagcattctataaaaaggatcttgcaaaaaggttactgttggggaagagtgcttccattgatgcagagaaatctatgatttccaagctaaagactgaatgtggcagccaatttacaaacaaacttgaagggatgttcaaggatattgaattatcaaaggagataaatgagtccttcaaacagtcatcccaggccaggacaaaactcccatcagggattgagatgagtgtccatgtcttgacaaccgggtactggcccacatatccccccatggatgttaggcttcctcatgaactgaatgtctatcaggacatttttaaggagttctatttaagcaagtacagtggaaggcgcttaatgtggcaaaattcattaggtcactgtgtgttgaaagctgagtttcctaaaggtaaaaaggagctggcagtttccctatttcagacagtcgttttgatgttatttaacgatgctcaaaagcttagttttcaagatattaaggatgccactggcatagaagataaggaactgaggaggactctacagtctcttgcttgcggtaaagtacgcgtcctgcaaaagttgccaaagggaagggatgtggaggatgatgattcatttgtgttcaatgaaggatttactgctcccctttatcgtattaaggtaaatgctatacagatgaaggaaacagtggaagaaaacactagcaccactgaaagagtatttcaggaccgtcaatatcaggtggatgctgccattgttcggataatgaagactagaaaagtgttgagtcacacacttctaataaccgaactcttccaacagctgaaatttcctataaagccggccgatctgaagaaaaggattgagagccttatcgatagggagtacctggagcgtgacaagaacaatccgcagatatataattacctggcctagtcccccattttgtcacacacacaaatgtgatgtttttctttgcatggcggcgtaatcaaatgttatctctcccctgtacagaaagttgtagttccttttttttccttcttctttgttttttcgttttttaacccaacatttgtaattgtaaagtataatcggcctttcttttgagacctttcatctcattctggacttgtgagcttcttgaaataaattacttatttttttctttcttttaatcatatgagaagctgcaccttgctggttgctgcagtttacatga

SEQ ID NO: 1527 - DNA, 2828 bp, Citrus clementina
ctcgcgtacaggaggagctggggaggaggatatctaaaaatctaaatagatatcaaatcttcttcattttttcacttctgcgtgcgtgtgctttttttcccccccgctttttttttttttttttcaatttgcagtgagtgaattaaaaatgcactaataaacgagctatttcatgtctctccccaacaaacgcacagccagcaacaacaacagcaacaattattcaccttcggcaatgaagaaggccaagtcccaagccgtggcctgctctgtggacaccgccaacaagaacggtctccaccacgacaacgacgccgttttcgatccctcttctatttctctcgatgatgatcttaagcccgacgaaccccgacaacaagccgccgccaatttatcccgcaaaaaagcccagccccctcagcccgccaaaaaacttgtcatcaagctcctcaaagctaaacccacactgcctacaaattttgaggaggatacatgggcaaagctgaagttagctataaaagcaatattcttgaagcaaccaacttcctgtgatttggaaaagctatatcaggctgtcaatgatctttgcctgcacaagatggggggaaacctttatcagcgaattgaaaaggagtgtgaagaacatatatctgctgcaattcgatcgttggtcggtcaaagccctgacttggtggttttcttatcactggttgagagatgctggcaggatctttgtgatcagatgttgatgattcgtggtatagctttgtatctagatagaacatatgtgaaacaaacaccaaatgtgcgttcattgtgggacatgggattgcagcttttccggaaatatctttcttcatattcagaagttgagcacaaaactgtcactggtcttttaaggatgattgagagggaaagattaggtgaagctgttgataggacactccttaatcatctattgaagatgttcaccgctctgggaatttactcagaaagctttgagaaaccatttcttgagtgcacgtcggagttttatgccgccgaaggcatgaaatacatgcagcaatcagatgttccagattacttgaagcacgtggagataaggttgcatgaagaacatgaaagatgtttactataccttgatgtaagcacaagaaagccacttatagcaactgccgaaaggcaacttcttgaacgacatatatctgcgattctcgacaaggggttcacaatgctgatggatggccatcgtactgaggacctacagaggatgtactcactattttcaagggtcaatgctctcgaatcattaaggcaggcccttgctatgtacattcgtagaactgggcatggcattgtcatggatgaagagaaagataaagatatggtttcgtctcttttggagttcaaggcttctcttgatacaatatgggaacaaagcttctcaaagaatgaagcattttgcaacacaataaaggacgcatttgagtatctaattaatcttcgtcagaaccgacctgctgagctgattgcaaagtttctggatgagaagcttcgggctggaaataagggtacttcagaagaggaattggagggtacacttgataaagttctggttttattcaggtttattcagggtaaagatgtgtttgaagcattctataaaaaggatcttgcaaaaaggttactgttggggaagagtgcttccattgatgcagagaaatctatgatttccaagctaaagactgaatgtggcagccaatttacaaacaaacttgaagggatgttcaaggatattgaattatcaaaggagataaatgagtccttcaaacagtcatcccaggccaggacaaaactcccatcagggattgagatgagtgtccatgtcttgacaacagggtactggcccacatatccccccatggatgttaggcttcctcatgaactgaatgtctatcaggacatttttaaggagttctatttaagcaagtacagtggaaggcgcttaatgtggcaaaattcattaggtcactgtgtgttgaaagctgagtttcctaaaggtaaaaaggagctggcagtttccctatttcagacagttgttttgatgttatttaacgatgctcaaaagcttagttttcaagatattaaggatgccactggcatagaagataaggaactgaggaggactctacagtctcttgcttgcggtaaagtacgcgtcctgcaaaagttgccaaagggaagggatgtggatgatgatgattcatttgtgttcaatgaaggatttactgctcccctttatcgtattaaggtaaatgctatacagatgaaggaaacagtggaagaaaacactagcaccactgaaagagtatttcaggaccgtcaatatcaggtggatgctgccattgttcggataatgaagactagaaaagtgttgagtcacacacttctaataaccgaactcttccaacagctgaaatttcctataaagccggccgatctgaagaaaaggattgagagccttatcgatagggagtacctggagcgtgacaagaacaatccgcagatatataattacctggcctagtcccccattttgtcacacacacaaatgtgatgtttttctttgcatggcggcgtaatcaaatgttatctcccctgtacagaaaattgtagttccttttttttctttttcttctttgttttttcgttttttaacccaacatttgtaattgtaaagtataatcggcctttcttttgagacctttcatctcattctggacttgtgagcttcttgaaataaattacttattttttttctttctttt

SEQ ID NO: 1528 - DNA, 2763 bp, Gossypium hirsutum
aatgctctgttgatcactttcatgtctctcccccccaccaaacgctctataaccaacgccactgcttcttcttcttcctcgcctcatttccaacctccaatgaagaaagccaagtcccaagccgttgcttgctccctcgacccaaacagaaacggcctccatcaccaccataacaaccaagacgataacaacgtcctttttgacccttcatctatgcccctccacgatgattccaagtccgccgatgctcgtactcccgccgccgctaatttgtctcgcaaaaaggctacccctcctcaacctgccaaaaagcttgtcatcaaactcgttaaagccaaaccaacattgcctacgaattttgaggtggagacatgggcaacgctgaagtcagccattattgccatatttttgaagcgaccagattcttgcgacttggagaagctttaccaggctgtcaatgatctttgcctgcacaagatggggggaagcctttatcaacgcattgaaaaagagtgtgaagaacatatatcttcagcactaagatctttggttgggcaaagcccagatttggttgttttcttatcacttgttgagaaatgttggcaagatctttgtgatcagatgttaatgattcgtggtatagccttgtatctagacagaacatatgttaaacaaaccccgaatgtacgttcattgtgggatatgggcttgcagctcttccgtaaacatctttccatggctcctgaagttgagcacaaaactgtcacgggtcttttgagaatgattgagggtgagaggttaggtgaagcggttgataggactctccttaaccatcttttgaagatgtttactgctttaggtatttactctgaaagctttgagaagccattcctggagtgcacgtctgagttttatgcagccgaaggaatgaaatacatgcagcaatctgatgttccagattacctgaagcatgtagagatgaggttgcatgaagaacatgaaagatgtgtactctacctggatgctcttacaagaaagccacttatagcaacagcagaaaagcaactgcttgaacggcatatacctgctattcttgataagggatttgtgatgctgatggatgggcgtcgtcttgaggaccttcagagaatgtactcactgttttcaagggtcaatgcccttgaatcactccggcaggcaataagttcatatattcggagaactgggcaagtcattgtcatggatgaagagaaagacaaggacatggtgccttccttgttagaattcaaagcttcgcttgattcaatatgggaagaaagcttttccaagaatgaggcatttggcaacaccatcaaggattcctttgagcatctaattaatcttcgtcagaaccgacctgctgagctgattgcaaagttcctggatgaaaagctccgtgctggtaataagggtacttcggaagaggaattagagggtacacttgataaagctttggttttatttaggttcatccagggcaaagatgtctttgaagcattttataagaaagatcttgcaaaaaggctgcttctaggaaagagtgcttctattgacgcagagaaatctatgattactaagctgaagactgagtgtggcagtcaatttacaaacaaacttgaaggaatgttcaaggatattgaactatcaaaggaaataaatgaatcattcaagcagtcatcccaggccagaacaaagcttccatctggaattgagatgagcgttcatgtcttgacaactgggtactggccgacatatccacccatgggtgttaggcttcctcatgaacttaatgtctatcaggacatctttaaggagttctacttgagtaagtacagtgggaggcgcctaatgtggcaaaattcattaggtcattgtgtcttgaaagctgattttccaaaaggtaaaaaggagctggcagtttccttattccagactgtagttctgatgttgttcaacgatgcccaaaagcttagctttcaagacattaaggactctactggcatagaggacaaggaattgagaaggaccttgcagtcccttgcatgtgggaaagttagagtcctacaaaagttgccaaaagggagggatgtagaagataatgactcattcattttcaatgatggatttactgctcctctctatcgtataaaggtaaatgctatccagatgaaagagacagtggaggagaacacaagcactactgaaagagtatttcaagaccgtcaatatcaggttgatgctgctattgttcggataatgaagaccaggaaggtgttgagtcacactcttctgataactgaactcttccaacagctcaagtttcccataaaaccggctgatttgaagaaaaggatcgaatctctcattgacagggagtacctggagcgggacaagaacaacccacaaatatacaattacttggcatagccttagtttattttattcttttcatccttttgtttcctttgatgatagatatctcctttgtaaatgacacgggaagctttggataagtcttatccaacaggctggagctgaaatcccctgtcagatccatgtacagtagcttgtagtatttattttgttgcgatcgatactgtaattgtaaagcatattagcatctgttttgatactttttttaacagacttgacagaccatacgagactacaggcactcgaaataagatgctgcatttttggataaaaaaaagtcgacgcggccgc

SEQ ID NO: 1529 - DNA, 2845 bp, Quercus alba
aataaacagaggtaaataaatatcatacaatgccctcctcttcttcttgatcacacctccttcatttcttctatttcatgtctctccccaccaaacgctcagccacatccaccacctccaacaacaacaactcttcttcttcttcttcttcttcttccaataccaaccccaaccccacatctcctcctcccttctccgccatgaaaaaggccaaatcccaagccgcagctctcgaccccaaaaacggtctccaccaccaagacttcaacaacagcaacaacaacaacagcgatgtcgttttcgacccctcttccatgtccgtcgacgacgatttcaagccccacgactcctccgccccttccccttcgccagctccgcctcgcgccgtcgccgccaatttgtccagaaagaaagcccagccgcctcagccccctaagaagcttgtcatcaagctcctcaaagcgaaaccaacactgcctgcaaattttgaagaggatacgtgggcaaagctgaaatctgctatatctgctatatttttaaagcaacccgatcctattgactcagagatactttatcaggctgttaatgacctttgtctacacaaattggggggaaatctttatcaacggattgagaaggagtgtgaagcgcacatctctgaagcattgcaatccttgtttggccaaagcccagatttggtggtttttctgtcacttgttgagagatgctggcaggatctttgtgaccaaatgttgttgattcgtggtatagccttgtatctagatagaacatatgtaaagcaaacacctaatgtgcgatcattgtgggacatgggattgcagcttttccgcaaacatctttcattatctccagaagttgagcacaaaactgtcacaggccttttaagaatgattcagagcgaaagattaggtgaagcagtggataggactctccttaaccatctcttgaagatgtttactgcattaggaatttatgcagaaagctttgaaaagccatttcttgagtgcacgtctgagttttatgctgctgaaggcatgaaattcatgcagcaatcagatgttccagattatctgaagcatgtagagacaaggttgcatgaggaacatgaaagatgtgtactctacctggatgcttgtacaagaaaaccactaatagcaactgcagaaaagcaactccttgaacgccacatatctgccattcttgataagggtttcatgatgctaatggatgggcaccgtattgaggaccttcagaggatgtattcactgttttcaagggtcaatgcgcttgaatcactaaggcaagcgcttagctcatacatccgcagaactgggcagggcattgtcatggatgaagagaaagacaaagatatggtttcatcccttttagaatttaaggcttcgcttgatacaatatgggaagaaagctattccaagaatgatgcattttgcaacaccattaaggatgcatttgagcatctcatcaatcttcgtcagaaccgacctgctgagctgattgcaaaatttctggatgaaaagcttcgtgctgggaataagggtacttccgaggaagaattggagggtactcttgataaagttttggttttattcaggtttattcagggcaaggatgtgtttgaagcattttataagaaggatcttgcaaaaaggctgcttttgggaaagagcgcttccattgatgcagagaaatcgatgatctctaagctaaagacagagtgtggcagccaatttacaaacaaacttgaaggaatgttcaaagacattgaattatcaaaagaaataaatgaatccttcaaacaatcatcccaggccaggacaaaactcccatctgggattgagttgagtgtacatgttttaacaacagggtactggccaacatatccgcccatggatgttagacttcctcatgaattgaatgtctaccaggacattttcaaggagttctacttgagcaagtacagtgggaggcgcttaatgtggcaaaattcgttaggtcattgtgtgttaaaagctgaatttcctaaaggtaaaaaggagctggcagtttctctgtttcagactgttgttttgatgctctttaatgatgctgagaggctaagctttcaagatattaaggactccactggaattgaagataaggaactaaggaggactttgcagtcccttgcatgtggaaaagttcgagtcctacaaaagatgcccaagggtagggacgtagaggatgatgattcatttgtgttcaacgatgtatttactgctcctctttaccgtataaaggtaaatgcaatacagatgaaggaaacagtagaggagaatacaagcaccactgaacgagtttttcaggaccgtcaatatcaggttgatgctgctattgtacgaataatgaagactagaaaagtgctcagtcacacacttctgataactgaactcttccaacagctcaaatttccaataaagccagctgatttgaagaaacggattgaaagccttatcgacagggagtatctagagcgtgacaagaacaacccgcagatatacaattacttggcataatcaatcttttttaatctatttgtaaatgacaagtgcggcttcagccttcaacaagaaggaagactgcccctttgtctatctgtacagtagtttgtagctttcatttttgttgtgtttaacactataattgtaaagcatatttagttgctgttttgaaattctcttccgtcggaggacttggtattcttgataataatcggcactttttggcaatagggttttactggaatgaatccgattgtggtcaatat

SEQ ID NO: 1530 - DNA, 2531 bp, Castanea mollissima
caaccccacatctcctcctcccttctccgccatgaaaaaggccaaatcccaagccgcagctctcgaccccaaaaacggtctccaccaccaagacttcaacagcaacagcaacagcaacaacaacgatgtcgttttcgacccctcttccatgtccgtcgacgacgatttcaagcctcacgactcctccgccccttccccttccccaactccgcctcgctccgtcgccgccaatttggccagaaagaaatcccagccgcctcagcccactaagaagcttgtcatcaagctcctcaaagccaaaccaacactgcctgcaaattttgaagaggatacatgggcaaagctgaaatctgctatatctgctatatttttaaagcagcccgatcctattgactcagagatactttatcaggctgttaatgacctttgtctacacaaattggggggaaatctttatcaacggattgagaaggagtgtgaagcgcacatatctgaagcattgcaatccttgtttggccaaagcccagatttggtggtttttctctcacttgtcgagagatgctggcaggatctttgtgaccaaatgttgttgattcgtggtatcgccttgtatctagatagaacatatgtaaagcaaacacctaatgtgcgatcattgtgggatatgggattgcagcttttccgcaaacatctttcattatctccagaagttgagcacaaaactgtcacaggccttttaagaatgattcagagcgaaagattaggtgaagcagtggataggactctccttaaccatctcttgaagatgtttactgcattaggaatttacgcagaaagctttgaaaagccatttcttgagtgcacgtctgagttttatgctgctgaaggcatgaaattcatgcagcaatcagatgttccagattatctgaagcatgtagagacaaggttgcacgaggaacatgaaagatgtgtactctacctggatgcttgtacaagaaaaccactaatagcaactgcagaaaagcaactccttgaacgccacatatctgccattcttgataagggtttcatgatgctaatggatgggcaccgtattgaggacctccagaggatgtattcactgttttcaagggtcaatgcgcttgaatcacttaggcaagcccttagctcatacatccgcagaactgggcagggcattgtcatggatgaagagaaagacaaagatatggtttcatcccttttagaatttaaggcttcgcttgatacaatatgggaagaaagctattccaagaatgatgcattttgcaacaccattaaggatgcatttgagcatctcatcaatcttcgtcagaaccgacctgctgagctgattgcgaaatttctggatgaaaagcttcgtgctgggaataagggtacttctgaggaagaattggagggtactcttgataaagttttggttttattcaggtttattcagggcaaggacgtgtttgaagcattttataagaaggatcttgcaaaaaggctgcttttgggaaagagcgcttccattgatgcggagaaatccatgatctctaagctaaagacagagtgtggcagccaatttacaaacaaacttgaaggaatgttcaaagacattgaattatcaaaagaaataaatgaatccttcaaacaatcatcccaggccaggacaaaactcccatccgggattgagttgagtgtacatgttttaacaacagggtactggccaacatatccgcccatggatgttagacttcctcatgaattgaatgtctaccaggacattttcaaggagttctacttgagcaagtacagtgggaggcgcttaatgtggcaaaattcgttaggtcattgtgtgttaaaagctgaatttcctaaaggtaaaaaggagctggcagtttctctgtttcagactgttgttttgatgctctttaatgatgctgagaggctaagctttcaagatattaaggactccactggaattgaggataaggaactaaggaggactttgcagtcccttgcgtgtggaaaagttcgagtcctacaaaagatgcccaagggtagggacgtagaggatgatgattcatttgtgttcaatgatgtatttactgctccactttaccgtataaaggtaaatgcaatacagatgaaggaaacagtggaggagaatacaagcaccactgaacgagtttttcaggaccgtcaatatcaggttgatgctgctattgtacgaataatgaagacaagaaaagtgctcagtcacacacttctgataactgaactcttccaacagctcaaatttccaataaagccagctgatttgaagaaacggattgaaagccttatcgacagggagtatctagagcgtgacaagaacaacccgcagatatacaattacttggcataatcaaatcttttttaatctatttgtaaatgacaagtgaagcttcagtcttctacataatggaagatagaagactgcccctttgtctgtctgtacagtagtttgt

SEQ ID NO: 1531 - DNA, 2858 bp, Arachis hypogaea
aaaagaggaagaggaagtgtgatccagagagtgagaagcaaagaagagagagttaaaattaaagaacgcaaagtacaatgctctcttgatcacttttcatttcatgtctcatcccactaagcgctctgccaccgcatccactgacgcctcctcttcctccgccgccgctacagcaaccatgaagaaggccaagtcgcaggccgttgcatgctctctcgactccaagaactccctcagtcaccaccatcaccaccatcatcgccagcacccagacgacacccttttcgaccctgccgcctctccgatggcgcttgacgacgatctcaagagcgacgaccagaatgcgcgcggcgccgtcgctgcaaatctgtcccgcaagaaagccacccctcctcaacccgccaagaagctcctcatcaagctccgcaaaggtaaaccaacgatgccaccgaattttgaggaggatacatgggaaacggtgagatcagctatttcagccatattcttaaagcaacatctttcttgtgacctggaaaagctttatcaggctgtaagtgatatgtgtcttcacaaaatgggggcgaatctttaccaacggattgaaagggagtgtgaaacacacatatctgcagcactgcagtctttagttggccaaagcccagacttggttgtttttctatctctagttgagagatgttggcaggatctttctgatcaaatgttgatgattcgtggtatagccttgtatttggataggacatatgtgaagcaaactacaaatgtacggtcactatgggacatgggattgcaacttttccgcaaacacctttcactatgtcaagaagtggaacacaaaactgttacaggtcttctacgtatgattgaaagtgaaagattaggtgaagcagttgatagaactctcctaaaccatctcttgaagatgttcactgctctgggaatttatgcagaaagctttgagaagccattccttgaatgcacatctgaattttatgctgctgaaggtatgaaatacatgcagcaatcagatgctccagattacttgaagcatgtggagacaagattgcaagaggaacatgagagatgtttgttgtacttagatgcaagtactaggaaggcgttgatagctactgcagaaaagcaacttcttgaacgtcatatacctgccattcttgacaagggttttacaatgcttatggatgcgaatcgtattgaagaccttcagagaatgtacacgcttttttcgagggtcaatgcacttgagtcattgcggcaagctcttagttcctatatcaggagaacggggcagggcattgttatggatgaggagaaagataaagatatggtttcatcccttctcatatttaaggcttcccttgacacaatatgggaacaaagctttttcaagaatgaagcattcagtaacactatcaaagatgcatttgagcatcttatcaatatccgccagaaccgacctgcagaattgattgccaaatttttggatgagaagcttcgagcaggtaataagggcacttctgaagaggaactggagggtacacttgacaaagtcctggttttattcaggttcattcagggcaaggatgtatttgaagcattctataagaaagatcttgcaaagagactgcttttaggaaagagtgcttctattgatgctgagaaatctatgatctccaagttgaagacagagtgtggcagtcaattcacaaataagctggaaggaatgtttaaggacattgaattatcaaaagaaataaatgaatccttcaaacagtcatcccaggcaaggtcaaaactaccatcagggattgaaatgagtgttcatgtcttaaccactgggtactggccaacatatccacccatggatgttagacttcctcatgaattgaatgtttaccaggatattttcaaagagttctatctaagcaaatatagtggaagacgtctgatgtggcaaaattcattaggtcattgtgtcttaaaggcagagtttcctaaaggaaaaaaggagctcgctgtgtccttatttcagactgttgttctaatgttattcaatgacgccgagaaactaagttttcaagatattaaagacgctactagcattgaggataaggaactgagaaggactctgcaatcacttgcatgtggaaaagttcgagtcctacaaaagattcccaagggtagagacgtcgaggatgatgactcatttgttttcaatgacacgtttatggctcctctttaccgtataaaggtgaatgcaattcagctgaaggagacagtcgaggagaacacaagcaccaccgagagagttttccaagaccgtcaatatcaggttgatgctgctattgtgaggataatgaagactagaaaagtgcttagtcacacccttcttatcactgaactcttccaacagctcaaattcccaataaaaccagctgatttgaagaaaaggatagaaagccttatagatagggagtatctagagagagataagaacaacccacaaatatacaattacctcgcttaaattagtatgcttctgacttcacattatagaattttcttgaatttttttgtaaatgacaatcatgggaaagacttcactgagtccctcagtcatatatgtatagtatactatgctggattctccctccaacctcaaccccctctctttttcactttatctacaatcgtactgtaattataaacccttttttattttgcctcttgaagttttctctatatcaatagttactcatcttaactactttctgtgtaacgcggtaagaatcatctccaccacatactcgcattgtaattta

SEQ ID NO: 1532 - DNA, 4072 bp, Glycine max
cttgttgattgtcaatgcatatatgttgtctttaatatttgtaattaattaatgtttatacaaggaaacagactaaaaaatatttatttatttttcattcattcattcataagtacacgttagaagaagagttgttaacttgttagaatagcttcacacgggtatttggggatggagcaagaaagagatttactcggtaaaatgataatatcatggcctccgcgatcatatactacacctaaatcacttcaagaagaatggggagtggagttccattttcactagataatttgtcgatcgagaatggtttccaaccagacttcagctccataattgccacattggttgtcctggtatttgtgtgattcaattctcacctggaaaatgcatatttttctggggtgccctaaagcattaaactacttttggtcaacattgatgctagtttctttcaagaagaaaatagcatgggtgtggcgatcgaggtgcttgccttgtatagtgctttggtgcagttcaaagatttgcaggttttaaatgttatagtggaggtcaaccttctagcattaaggagaagttatctatcaacttctggtgctgtcattgcaaagtgtcgtcacttaataatctctattacaaatcccaaagtttgttttgttttacgcaaactgattgtgcaactagttcataacgatcccactaatcaaccaacaacaactaccatagagaagtgacaaactaatcaagttactcacaacttagttaggatggttagatcttatgctggtctccatgacttccattatttaccttcgtattgcagagcaagcttttataaaaataagatgagcatgttactttttttataaaataaaaaaccttgttataactactttattacatgaaaaaagaaaaatgaaatcgttaaacctatatatttaagctaaaaaaatataaaatagattttaaaaagagaagtgtgtgagtccgattttgtaatctcagaccctttactctgaccttgttctgatctgtgtgcgggtgctcttcttgtgttctgcttcactcactcaccactcaatgtgttgttgatgtctaatacgaaactatcccctcctatgaagaaggcgaaatccatcgactccaagaacgccgccgcctccgcctccgatgaccccaatgcgcctgctctcatcgccgccaatttgtcgcgcaagaaagccactcctccccatccccccaagaagttcctcattaggttccacaaaggtgtaccaacattgcccccaaattttgaggaggaaacatgggcaaaattgaagtcagctattggtgctatatttatgaagcaacctgtttcctgtgacttggagaatctttatcaggctgtgaatgatctttgcctttacaaaatggggggaaatctttatcaacgaattacaaaggagtgtgaagagcatatatctgtggcactgcagtctttagttggccaaagcccagatttgattgtttttctatccctagttgagaggtgttggcaggatctttgtgaccaactgttgatgattcgtggtatagccttgtttctggataggacctatgtgaaacaaacaacaaatgtacggtcattatgggacatgggtttgcaacttttcagcaaacatctttctctatcttcagaagtagaacataaaactgttactggtcttctccgtatgatcgaaagtgaaagatcaggcgaatcagtggatagaactcttctaaatcatcttttgaagatgtttactgctctgggaatttatgtagaaacctttgagaagccattccttgagtgcacatccgaattttatgcggcggaagttatgaaatacatgcagcaatcagatgctccagattacttgaagcatgttgagacaagattgcaagaggaacatgaaagatgtttgttgtacttggatgcaagtactaggaaaccattgatagggattgcagaaaagcagcttcttgaacgtcatatacctgccattcttgataagggttttattatgcttatggatgggaatcgtattgaagaccttcagagaatgcactcactcttttcaagggtcaatgcccttgaatcactgaagcaggcccttagttcatacattaggagaactgggcagggcattgttatggatgaggagaaagataaagatatggtctcatcccttcttgaatttaaggcttctcttgacacaatatgggaagaaagctttttcaagaatgaacctttcagcaattcaattaaagatgcatttgaatatcttatcaatcttcgtcagaaccgacctgcagagttgattgccaagtttttggatgagaaacttcgtgcaggtaataagggtacttctgaagaggaactagaggctacacttgataaagtcctggtgttattcaggttcattcagggcaaggatgtatttgaagcattctataagaaagatcttgctaaaagactgcttttaggaaagagtgcttctattgacggtgagaaatctatgatctccaagttgaagactgagtgtggcagccagttcacaaacaaactggaaggaatgtttaaggacattgaattatcaaaagaaataaatgagtcattcaaacagtcatcacaggcgaggtcaaaacttgcatcagggattgaaatgagtgttcatgttttaaccacagggtattggccaacatatccccccattgatgttagacttcctcatgaattgaatgtttaccaggatattttcaaagagttctatctaagcaaatacagtggaagacatctgatgtggcaaaattcactaggtcactgtgtcttgaaggcagagtttcccaaaggaagaaaggagttggctgtgtccctttttcagactgttgttctaatgttattcaatgatgctgagaagttaagtcttcaagatatcaaagatgctactggtattgaggacaaggaactgagacggattctgcaatcactagcttgtggtaaagttcgtgtcctacaaaagatgcccaaaggaagagatgtggaggacgatgactcatttgtttttaatgatgggtttacagctcctctttaccgtataaaggtgaatgcaattcaattgaaggagacagtcgaggagaacacaagcaccaccgaaagagttttccaagaccgtcagtatcagattgatgctgctcttgtgaggataatgaagactagaaaagtgcttagtcacacccttcttattactgaactcttccaacagctgaaattcccaataaaaccagctgatttgaaaaaaaggattgaaagcctcattgacagggagtatctagagagggacaagagcaatcctcaaatatacaattacctcgcatagcatattctgcgttattttacaattaaattttcttttgtaaatgacatgggagagagggtttgatgttcaatcccttgttatatgtacagtaagcatgaagggtttctttttaatcttttccaccctttcattgatggcaactgtactgtaattataaaagcatgtttattctcttttaagttttactattttcttcaaattaaaagtcactgacccaaacccatacacaaacatttggatcaaatttaatgataaatattacaagttattagtcacattaccacttacagtcgtgcatttattttttaatttactattcaactttaatataatgtttttatattttgtttttctcctcataattacacaggttttatatttgagtaactctagagaattaatcgtttttgttcccaattacatcacaaaagtattctttattctcatttgttgcattagtaaatacaagagtttaaacttattaaagtaatgattgcattaaggttggtacatgctcacgttaatgatacaataatgtttccaccactttaattgtcatttacagacttcctaattaaatatcctgagtgctctttatcaatgatatttccttcggctttcagaaaaatataatgtgttctttcacgaaagcattctcacacagttacaac

SEQ ID NO: 1533 - DNA, 2630 bp, Euphorbia peplus
atgtctctccccaccaaacgctctctctccgcctccgccgctagctcctccgccaattttcctccgatgaagaaagccaagtctcaggccgtctccgccgcctttgacagaaacggtctccaccactttaacccttcctccactcccgaaaacgacgtcgttttcgacccctcttctatttctctcgacgacgattcccaccgctctcctcctcccgccgctaatctttctcgcaaaaaagctactcttcctcagccccctaagaagttcgtcatcaagctcgtcaaagctaaaccaacattgcctacaaacttcgaggaggatacatgggcaaagctgcagtcggcaattaaagcaatattcttgaaacaaccagattcttgtgacttggagaagctgtatcaggctgtcaataacctttgtctactcaagatgggtggaaatctttatcagcgtattgagaaagaatgcgaagcacacatttctgaagcattacaatctttagttggtcagagcccagatttgatggttttcttatcacttgttgagagatgctggcaggatctttgtgaccagatgttgatgattcgtggtatagccttatatcttgatagaacctatgtgaaacaaaccccaaatgtgcgttcattgtgggacatgggtttgcagctttttcgaaaacatctttctttgtctcctgaagttgagcacaaaactgtcacaggtcttctgcgaatgattgaaagggaaagattgggggaaacagttgatagaacactcctaaatcatcttttgaaaatgtttactgctttaggcatttatgctgaaagctttgaaagacaattccttgatggaacatctgaattttatgctgctgaaggcacgaaatacatgcaacagtctgatgttccagattacttaaagcatgttgagataaggttgcatgaagaacacgaaagatgcttgctctaccttgatgcaagcactagaaagccacttatagcaacagcagaaaggcagctccttgaacgccatatatctgcaattttggataagggtttcatgatattgatggatggccatcggattgaggaccttaagaggatgtattcattgttttcaagggtcaatgcccttgaatcactaagacaggctcttagctcatgcatccgtaaaaccgggcaaggaattgtcatggatgaagagaaggataaagatatggttttctccttgttagaatttaaggcttccctagacacaatatgggaagaaagcttttcaaagaatgaagcattttgcaataccataaaggatgcgtttgagcatctaattaatcttcgccagaaccgaccagctgagctgattgcgaagtttctggatgaaaagcttcgtgctggaaacaagggtacttctgaagaagagttggagggtacactagataaagtcttggtgctcttcaggtttattcagggcaaggatgtctttgaagcattttacaagaaggatcttgctaaaagactactgctgggtaaaagtgcttctatcgacgcagagaaatctatgatatctaagctcaagaccgagtgtgggagccaatttacaaataaactcgaaggaatgtttaaggatattgaactgtccaaggagatcaatgagtccttcaaacaatcttcacaggccagaacaaaacttccttcaggaattgagatgagtgtgcacgtattaacaacaggatactggcctacgtatccgccaatggatgttaggcttcctcatgagctaaatgtctaccaggatatatttaaagaattttacttgagtaaatatagcggcaggcgtttaatgtggcaaaattcattgggtcattgtgtactgaaagctgaatttcctaaaggaaaaaaggagctggccgtttccctatttcagacggtcgttttaatgttatttaatgatgcccaaaaacttagttttcaagatatcaaggatgccactagcatagaggacaaggagctgagacgaactttgcagtctcttgcatgcggaaaagtccgtgtcctacaaaagattccaaaagggagggacgttgaggacgacgattcgtttttgttcaatgatgtatttactgctcccttgtatcgtataagggttaatgcaatccagatgaaggaaactgttgaagagaacacaagcaccaccgagagagtatttcaagatcgtcaataccaggttgatgctgccattgttcgtataatgaagacaaggaaagtcttaagtcacacacttcttattacagaactctttcaacagctgaaatttccgataaagccggcggatttgaagaaaagaatagagagcctgatagacagggagtacctagagagagacaagagcaatcctcagatatacaattacttggcataagttatgtttgaaatgaatctctccttgtacatgacatggaaattctatgaccgattcaaaaaggcacgcagttaaatccatgtggtattgttattattattattgtacagtataatattgtagttgtttattttcgtcccgtaaaacacaacacaagtgtaaagtatatttagcttcccagttatcggttgtagtcttcccggcgctta

SEQ ID NO: 1534 - DNA, 2764 bp, Fagus grandifolia
aaacagacatatctattcccattctctaatcctcaaaatcccttatttctttcattcttttgggttttacaaaatttacaatgctctcttgatcacatttctatttcatgtctccacccaccaagcgctcatccataaccaccaccaccaccggcgaagccacttctaatccaaaccccaatcccacatcttctcctccttccttccctccaatgaaaaagccaaatctcaagccctcgctctcgaccccaaaaacggtctccaccaccaggacttcaacaacaacgacgtcgttttcgaccactcctccatgaccctcgacgactcctccgccccttctccagctcccgccgccaatttggccaggaaaaaggcccagcctcctcagcccgccaagaagctagtcatcaagctcgtcaaagccaaaccaacattgcctgcaaattttgaagaggatacatgggcaaagctgagatctgctatatctgctatatttttaaagcaacctgatcctattgactcagagatactttatcaggctgttaatgatctttgtctacacaagttggggggaaatctttatcaacggattgaaaaggagtgtgaagcacacatatctgcagcattgcaatccttagttggccaaagcccggatttggtggtttttttatcacttgttgagagatgctggcaggatctttgtgaccaaatgttgttgattcgtggtatagccttatatctagatagaacatatgtaaagcaaacacctaatgtgcgatcattgtgggacatgggattgcagcttttccgcaaacatctttcattatctccagaagttgagcacaaaactgtcacaggccttttaagaatgattcagagcgaaagattaggtgaagcagtggataggactctccttaaccatcttttgaagatgtttactgccttaggaatttacgcagaaagctttgagtaaaccctttcttgagtgcacatctgagttttatgctgctgaaggcatgaaatacatgcagcaatcggatgttccggattatctgaagcatgtagagacaaggttgcacgaggaacatgaaagatgtgtactctacctggatgctagtacaagaaaaccactaatacaaactgctgaaaagcaactccttgaacgccacatatctgccattcttgataaggggttcatgatgctaatggacgggcaccgtattgaggaccttcagaggatgtattcactgttttcaagggtcagtgcccttgaatcactaaggcaagcccttagcgcatacatccgcagaactgggcagggcattgtcatggatgaagagaaggacaaagatatggtttcatcccttttagaatttaaggcttcacttgacacaatatgggaagaaagcttttccaagaatgaaggattttgcaacaccattaaggatgcatttgagcatctcatcaatcttcgtcagaaccgacctgctgagctgattgcgaaatttctggatgagaagcttcgtgctgggaataagggtacatctgaggaagaattggagggtactcttgataaagttttggttttattcaggtttattcagggaaaagatgtgtttgaggcattctataagaaggatcttgcgaaaaggttgcttttggggaagagtgcgtccattgatgcagagaagtccatgatctcaaagctaaagactgagtgtggcagccaatttacgaacaaacttgaaggaatgttcaaagacattgaattatcaaaagagataaatgaatccttcagacaatcatcccaggccagaacgaaactcccatccggtattgagatgagtgtgcatgttctaacaacagggtactggccaacatatccacccatggatgtcagacttcctcatgaattgaatgtctaccaggacattttcaaggagttttacttgagcaagtacagtgggaggcgcttaatgtggcaaaattcgttaggtcattgtgtgttaaaagctgaatttcctaaaggtaaaaggagctggctgtttcactgtttcagactgttgttttgatgctctttaatgatgccgataagttaagctttcaagatattaaggactccactggcattgaggataaggaactgaggaggactttgcagtccctcgcgtgtggaaaagttcgagtcctacaaaagatgcctaagggtagagatgtggaggatgacgattcatttgtgttcaatgacatatttaccgcgcctctttaccgtataaaggtaaatgcaatccagatgaaggaaacagtcgaggagaatacaagcaccactgaaagagtttttcaggaccgtcaatatcaggttgatgccgctattgttcgaataatgaagactaggaaagttctcagtcacacacttctgataactgaactcttccaacagctcaaatttccaataaagccagctgatttgaagaaaaggatcgaaagccttattgacagggagtatctagagcgtgacaagaacaacccacagatatacaattacttggcgtaataaaacctttttgaatctattgtaaatgacaagggaagcttctatcctctgcagaaagcatgatggtaatcccttgttagattaatgtacagtagtttgtagttttcattttttgttgtggtcaacactgtaactgtaaagcatattcaatcgctgttttgaatctttctcttccttcagaggacttggtatgcttgataataatcggct

SEQ ID NO: 1535 - DNA, 3062 bp, Gossypium raimondii
attataatctttctctctcttcctctctcactcacaaatttttatcttttgctgctttgctgtgctgccttctcaaatcttccttctttttcctgtgtgtataaggcattattaaggcaacattatcccaaatcaaaaggaagcgaaggagctgaagattttacaatgctctgttgatcactttcatgtctctcccccccaccaaacgctctataaccaacgtcactgcttcttcttcttcttcttcctcgcctcatttccaacctccaatgaagaaagccaagtcccaagccgttgcttgctccctcgacccaaacagaaacggcctccatcaccaccataacaaccaagacgataacaacgtcctttttgacccttcatctatgcccctccacgatgattccaagtccgccgatgctcgtactcccgccgccgctaatttgtctcgcaaaaaggctacccctcctcaacctgccaaaaagcttgtcatcaaactcgttaaagcaaaaccaacattgcctacaaattttgaggtggagacatgggcaacgctgaagtcagccattactgccatatttttgaagcgaccagattcttgtgacttagagaagctttaccaggctgtcaatgatctgtgcctgcacaagatggggggaagcctttatcaacgcattgaaaaagagtgtgaagaacatatatctacagcactaagatctttggttgggcaaagcccagatttggttgttttcttatcacttgttgagaaatgttggcaagatctttgtgatcaaatgttaatgattcgtagtatagccttgtatctagacagaacatatgttaaacaaaccccgaatgtacgttcattgtgggatatgggcttgcagctcttccgtaaacatctttccatggctcctgaagttgagcacaaaactgtcacgggtcttttgagaatgattgagggtgagaggttaggtgaagcggttgataggactctccttaaccatcttttgaagatgtttactgctttaggtatttactctgaaagctttgagaagccattcctggagtgcacatctgagttttatgcagccgaaggaatgaaatacatgcagcaatctgatgttccagattacctgaagcatgtagagatgaggttgcatgaagaacatgaaagatgtgtactctacctggatgctcttacaagaaagccacttatagcaacagcagaaaagcaactgcttgaacggcatatacctgctattcttgataagggatttgtgatgctgatggatgggcgtcgtcttgaggaccttcagagaatgtactcactgttttcaagggtcaatgcccttgaatcactccggcaggcaataagttcatatattcggagaactgggcaagtcattgtcatggatgaagagaaagacaaggacatggtgccttccttgttagaattcaaagcttcgcttgactcaatatgggaagaaagcttttccaagaatgaggcatttggcaacaccatcaaggattcctttgagcatctaattaatcttcgtcagaaccgacctgctgagctgattgcaaagttcctggatgaaaagcttcgttctggtaataagggtacttcggaagaggaattagagggtacacttgataaagctttggttttatttaggttcatccagggcaaggatgtctttgaagcattttataagaaagatcttgcaaaaaggctgcttctaggaaagagtgcttctattgacgcagagaaatctatgattactaagctgaagactgagtgtggcagtcaatttacaaacaaacttgaaggaatgttcaaggatattgaactatcaaaggaaataaatgaatcattcaagcagtcatcccaggccagaacaaagcttccatctggaattgagatgagcgttcatgtcttgacaactgggtattggccgacatatccacccatgggtgttaggcttcctcatgaacttaatgtctatcaggacatctttaaggagttctacttgagtaagtacagtgggaggcgcctaatgtggcaaaattcattaggtcattgtgtcttgaaagctgattttccaaaaggtaaaaaggagctggcagtttccttattccagactgtagttctgatgttgttcaacgatgcccaaaagcttagctttcaagacattaaggactctactggcatagaggacaaggaattgagaaggaccttgcagtcccttgcatgtgggaaagtaagagtcctacaaaagttgccaaaagggagggatgtagaagataatgactcattcattttcaatgatggatttactgctcctctctatcgtataaaggtaaatgctatccagatgaaagagacagtggaggagaacacaagcactactgaaagagtatttcaagaccgtcaatatcaggttgatgctgctattgttcggataatgaagaccaggaaggtgttgagtcacactcttctgataactgaactcttccaacagctcaagtttcccataaaaccggctgatttgaagaaaaggatcgaatctctcattgacagggagtacctggagcgggacaagaacaacccacaaatatacaattacttggcatagccttagtttattttattcttttcatccttttgtttcctttgatgatagatatctcctggtaaatgacacgggaagctttggataagtcttatccaagaggctggagctgaaatcccctgtcagatccatgtacagtagcttgtagtatttattttgttgcgatcgatactgtaattgtaaagcatattagcatctgttttgatacttttttttaacagacttgacagaccatacgagactacaggcactcgaaataagatgctgcatttttggatgtttttgtggtttcccttgtttgattttcctgtaactagtaaaaagcaggagggttttggctgcccgtgtcaattcgaacttgaatcggtaatgatttgagtctgagaaaacttgagcctgtaatagagccgagctcgagaaacccgagct

SEQ ID NO: 1536 - DNA, 2870 bp, Malus domestica
ctcaaatcttcgtctcgctttctctctcctcactttctctctctatctctttcacttacaatgcgctgttgatgagtttgatgtctcaccccaccaaacgctcctcagccatcaaccacagcagcagcggcacctcctcctcctcttcctcctctctcaacccttcttccgccggcccgcccatgaaaaaggccaagtcgcaggcggtggcctgttccctcgatcccagcaaaaatggcctccaccaccaccaccaccaccctcacactcaccctacccaggaccccgataacgacgccgtattcgacccctcttccatgtccctcgacgatgatctcaggcccgacgacccctctccccgaggcgtcgccgccaatttgtcccgcaaaaaggcccagccccctcagccctctaccaagaagctcgtcatcaagctcgtcaaagctaaacccacgttacccacgaattttgaagaggaaacatgggcaaagctgaagtcggctatttgtgctatattcttgaagaaacctgattcttgtgacttggagaagctttatcaggctgttactgatctctgtttgcacaagatgggaggaagtctttatcaacgaattgagaaggagtgcgaaagacacatagctgcagcgctgcaatctttggttggccaaagcccagatttagtggtctttctatcacttgttgagagatgctggcaggacctttgtgatcagatgttaatgattcgcggtatagccttatatcttgataggacatatgtgaaacaaacaccaaatgtgcgttcattgtgggacatgggattgcagcttttccgcaaacatctttctctgtctccagaagttgaacacaaaactgtcactggccttttaagaatgatagagaaagaaagattaggtgaagcagtggccaggactctgcttaaccatcttttgaagatgtttacagctttagggatctactcagaaagctttgagaagccatttcttgaatgtacttctgaattctatgctgctgaaggcatgaaatatatgcagcaagcggatgttccggattacttgaagcatgtggagacaaggttgcatgaagaacatgaaagatgtttaatctacctggatgcaagtacaagaaagccattagttgcaacagcagaaaaacagcttttagagcgccatattcctgccattctcgacaagggtttcacattgctgatggatggcaatcgcattgaggaccttcaaaggatgcacactcttttctccagagtcaatgccctggaatcactaaggcaagcgcttagctcatacatccggaggacagggcaggggattatcatggatgaagaaaaagataaagaaatggttgcttctcttttggaatttaaggcttctcttgacactatatgggaagaaagctttttcaagaatgaagtattttgcaacaccataaaggatgccttcgagcatttaattaatctccgacagaaccgacctgctgagctgattgcaaagtttttggacgagaagcttcgtgctgggaataagggtacttctgaagaggaattggagggaatgcttgataaggtcttggttttattcaggtttatacagggtaaggacgtgtttgaagcattttataagaaagatcttgcaaaaaggctactgttgggaaagagtgcttctattgacgcagagaagtctatgatttccaagctgaagaccgagtgtggcagtcagtttacgaacaaacttgaaggaatgttcaaggatattgaactgtcgaaggagataaacgagtccttcaaacaatcatcccaggccaggacaaaactcccatcagggattgagatgagtgttcatgtccttacgactgggtactggcctacatatcctcccatggatgttagacttcctcatgaattgaatgtttaccaggatatcttcaaggagttttacctaagcaagtacagtggtaggcgtttgatgtggcaaaattcattaggccactgtgtcttgaaagcagagtttcctaaaggcaaaaaggagcttgcagtttctctgtttcagaccgttgtcttgatgctgtttaatgatgctgagaagctaagccttgaagacattaaggattcaactggcattgaggacaaggaactgagaagaactctgcagtcccttgcatgtggaaaagttcgtgtcctacaaaagtttcccaaggggagagacgtggacgatggcgatacatttacgttcaatgattcatttactgctcctctctaccgcataaaggtgaatgcgatccaaatgaaggaaacagtggaggagaacacgagcaccactgaaagagtatttcaagaccgccaatatcaggttgatgctgcaattgtacggataatgaaaactaggaaggtgctgagtcacactcttctgataacagaactgttccaacagcttaaatttccgataaagccggcagatttgaagaaaaggattgaaagcctgattgaccgggagtacctagaacgggacaagaacaacccgcaaatttacaactacctagcataataaaggaaatggaacccagcagatattgaagttttctcctctgtaaatgacacgggaaagacgacgacttctgtcctggggagggaagaaggcatgatgtcctgtccggtccggtccccttccctcgtctaatttattatgtacagcgacttgtagtttttatcttctttttttccctaaatttttgtactttgattgtaaaaaatatttagtctccgtttttcacatctcctgttcctgcaaaaaagagtcgactacttgaatgaattgctgtgaacaaagaaaaaaaacaaa

SEQ ID NO: 1537 - DNA, 2382 bp, Trifolium pratense
aattttgaggagcagacatgggcaacactaaagtctgctatatgtgctatattttttaagcaacctaactcctgtgacttagagaagctttatcaggccgtcgaagatctttgcattcataaaatgggtggaaatctttatcaacggattgaaaaggaatgtgaagtacacatatctgcagcactgcagtctttggtcggacaaagccaggatttggttgtgtttctatctctagttgaaagatgttggcaggatcattgtgatcaaatgctgatgattcgtgatatagccttgtttctggataggacatatgtgaagcaaaattcaagtatacggtcattatgggacatgggcctacaacttttccggaaacatctttcactgtctcctgaagttcaacacaaaactgttactggtcttctacgaatgattgacagtgaaagattaggggaagcagtggatagaactcttctaaaccatctcttaaagatgtttactgctttgggactttatccagaaagctttgagaagccatcccttgattgtacatctgaattttatgctgctgaaggtgtgaaatacatgcagcaatcagatgttccagattacttgaagcatgtggagacaagattgcaagaggaacatgaaagatgtttgatctacttggacgcaaatactaagaagacattgatagaaagaacagaaacacaacttcttgaacgtcatatacctgccattcttgataagggtttctccgtgcttatggatggaaatcgtattgaagaccttcaaagaatgcactcactcttttcaagggtcaatgccctcgagtcactgaagcaggcccttagttcatacatcaggaggactgggcagggcattgttatggatgaggagaaagacaaagacatggttcaatcccttcttgaatttaaggctgctcttgacacaacatgggaagaaagctttgccaagaatgaagcattcggtaacaccattaaagatgcatttgagcatcttatcaatctccgtcagaaccgacctgcagagttaattgccaagtttttggatgataaacttcgtgcgggtaataagggtacttcagaagaggaattagagggcacacttgataaagtcctggttttattcaggttcattcagggcaaggatgtgtttgaggcattttataagaaagatcttgctaaaagactactgttaggaaagagtgcttctattgacgcggagaaatccatgatctccaagttgaaaactgagtgtggtagccagtttacaaacaaattggaaggaatgtttaaggatattgaattgtcaaaagaaataaacgagtccttcagacagtcatcccaggcgagaacaaaactcccatctgggattgaaatgagtgttcatgtcttgactactgggtactggccaacctatccacccatggatgtcagacttcctcatgaattgaatgtttaccaggatatttttaaagagttctatctaagcaaatacagtggaaggcgtctcatgtggcaaaattctttaggtcactgtgtcctaaaggcagattttccgaaagggaaaaaggaattggcggtctccctatttcagactgttgttctgatgcaattcaatgatgctgagaaactaagctttcaagatatcaaggattctactgctattgaagacaaggaactgagaaggactctgcaatcacttgcttgtggaaaagttcgtgtcttacaaaagatgccaaagggtagagatgttgatgatgatgactcgtttgtttttaatgatacgtttaccgcccctctttaccgtataaaggtgaatgcaattcagttgaaggagacagtggaggagaacacaaacaccacagaaagagttttccaagatcgtcaatatcaggttgatgctgctattgtgaggataatgaagactaggaaagtgcttagtcacacacttcttattactgaacttttccaacagctcaaatttcctattaaaccagctgatttgaagaaaaggattgaaagcctgatcgacagagagtatctggagagggacaagagcaaccctcaagtatacaattacttggcatagtatattttaccttattttacatttcaaagtttttttttttaattgatatgggagaagcttaatgtttattcccttgtcatatatgtacagtaacaacggatcccaccccttccccccttttttgtcctttcatttatcgacaactgtactgtaattgtaaagtatatgttttccctcttttgaatttccttttattttcttcaaaatcaaatattgttccactaaattatcgagattccataagggttcactcatataattaacattttc

SEQ ID NO: 1538 - DNA, 3134 bp, Populus trichocarpa
ataacacacacagatcactttattttgttaatgtctctccccaccaaacgctcagccacagccaccactagcaccgccggtacttccacctctaatacttaccctccaatgaagaaggccaagtgtcaggccgcctctgcctgctcacctctcgactacaacaaaaacggcctccatcactccgatgacgtcgtcttcgatccttcctccatgtctctcgacgacgatcccaagctcgtcgactaccgccctcctcccgccgccgctaatttgtctcgcaaaaaagctactcttccacagcccgctaagaagctcgtcatcaagctcgtcaaggctaaaccaactctgcccacaaattttgaggaggatacatgggcaaagctgcagtcagctattaaggctatattcttgaaacaaccagctctttgtgacttagagaagctttatcaggctgtcaatgatctgtgcctgcataagatgggggggaatctttatctacgaattgaaaaggagtgtgaagcacatatatctgcagctttacaatccttagttggtcaaagcccagatttggaggttttcttaaaacttgttgcaacgtgctggaaggatctctgtgaccagatgttgatgatccgtggcatagccttgtatctggacagaacatatgtgaaacaaaccccaaatgtgcgttcattgtgggacatgggcttgcagcttttccgcaaacatctttctttgtctcctgaagttgagcacaaaactgtcactggcatcttgcgaatgattgagagggaaagattaggtgaatcagctgatagatctctccttgaccatctcttgaagatgttcacttcactaggaatttatgcagaaagttttgaaagacctttccttgagtgcacatctgaattctatgctgctgaaggcatgaaatacatgcagcaatcggatgttccagattacttgaagcacgtggagtcaagattgaatgaagaacaagatcgatgtaatatttacattgatgcaagcactaaaaagccactaatagcaactgcagaaacgcagctacttgaacgccatatatccgcgattcttgataaggggttcatgatgctgatggatggacatcggattaaggaccttcagacaatgtactcattgtttttaagggtcaatgcccttgagtcattaaggcaggcccttagcatgtacatcagaagaaccgggcagggcattgtcatggatgaagagaaggacaaagatatggtttcctccctgttagaatttaaggcttctcttgactcaatatgggaagaaagcttctccaagaatgaaggattctgcatcaccataaaggatgcatttgagcatctaattaatcttcgccagaaccgtcctgctgagctgattgcaaagtttttggacgagaagcttcgtgctgggaataagggtacatccgaggaagagttggagggtacacttgataaagttttggttttattcaggtttattcagggtaaggatgtctttgaagcattttataagaaggatcttgcaaaaagactgctgttgggaaaaagcgcttctattgatgcagagaaatctatgatatctaagctgaaaactgaatgtggtagccagtttacaaacaagcttgaaggaatgtttaaggatattgaactatcaaaggagataaatgagtccttccgacaatcatctcaggccaggacaaaacttccatcagggattgaaatgagtgtacatgttttaaccactgggtactggcccacatatccacccatggatgttaggcttcctcatgagctgaatgtttatcaggatatattcaaagaattctacttaagcaagtatagtggtaggcgcttaatgtggcaaaactcattgggtcattgtgtattgaaagctgagtttccaaaaggtaaaaaggagctggcagtttctctatttcagactgtcgttctgatgctgtttaatgatgcccaaaagcttagttttcaagatatcaaagactctactggcatagaagacaaggagcttagaagaactttgcagtctctggcatgtggaaaagttcgggttctgcaaaagctgcccaaagggagggatgtggaggaggatgattcctttgtgttcaatgaaggatttacagctccactctatcgaataaaggtcaatgcaatccagatgaaggaaactgtagaagagaacacaagcaccactgagagagtgtttcaggatcgtcaataccaggtcgatgctgcgattgttcggataatgaagacaaggaaagtgctaagtcacacgcttcttataactgaactattccagcagctgaagtttcctataaagccggctgatttgaagaaaaggatagaaagtcttatcgacagggaatacctggagcgagacaagaacaaccctcagatatacaattacttggcctaacacactgccacaccaattgtgtccttgtaaatggcacgggaaacttctgtcccatccaagaggcaggtgttccatcgtggtcagattaatgtacagtatgtagttgtttatttttgctgcaatcaacactgtagttgtaaagcgtattctgcctcagtccattactttctctgctgttatatgttctctgagtcgcctgagataaaggggggaatttgattcaaaagaaaaggggaaattaagctccgctcccaggagtggcttatgcgagagacaggagaggtgagaaaagcaaactggcattttcaccagccataataagaatgatggagctttaataggactggggatgatgcatgtttacttacacctcgaactttacaattgatgttcaaatcgagctcatagttttattcttattcaacggctgttgttgcatttgaaggcatagttctcatgttgcccgttgttctgatcttacttctttggttcctttattttcatcttaaattttataggtaacttcacccgtataaatcctatttaccaatatagtcccaaaccttgtacaattgttactgatcgattcaatctaattaatttgcacattttctgtgctcgttgattcctcagaaaggctctgaagcaaactcaaccagttgtgacat

SEQ ID NO: 1539 - DNA, 2627 bp, Gossypium hirsutum
tttgatcatcacttccatgtctttcaatctcctttcacaaaacgctctcttaagcaacgctgatcgttaatccccaaaacgccattgctgcttcttcttcttcatcatctgcaaatcatcaatgacgaaagcaaagtctcattcggtggctggttctatagacccaaacaaaaatggccttcatcaccaccatcaagacggtaacgacgtcgttttcgacccttcatctatgtccctcggcgatgattctaagtccggtgtttctcgttctcccgccaccgctaatctctctcgtaaaaaagcaaccccgcctcaacccgccaaaaagctcgtcatcaaattcgttaaagctaaaccgacaatgcctacaaattttgaggaggagacatgggcaaagctgaagtcagccattaatgctatatttttgaagcagccagattcttgtgacttggagaagctttatcaggatgtcaataatctttgcctgcacaagttgggaggaagcctttatcagcgaattgaaaaagagtgtgaagaacatatatctgctgcactaagatctttggtagggcaaagcccagatctggttgttttcttatcactcgttgagaaatgttggcaagatctttgtgatcaaatgttgatgattcgtagtatagccttgtatcttgacagaacatatgttaagcaaaccccaaatgtacgttcattatgggacatgggcttgcagctcttccgaaaacatctttctctagctcctgaagttgatcacaaaactgttactggccttttaagaatgattgagagtgagaggttaggagaagctgtcgacagaacactcattaaccatcttttgcagatgttcaccgccttaggcatttactcaggaagctttgagaagccattcctagagtgcacgtctgagttttatgcggctgaaggaacaaaatacatgcaacaatatgatgttccagattacctgaagcatgttgagactaggttacatgaagaacatgaaagatgcttactctacctgggtgatcttacaagaaagccactaatagcaacagtggaaaggcaactccttgaacgtcatatacatgccattcttgataagggatttatgatgcttatggatggacaccgtattgaggaccttcagaggatgtactcactgttttcaagggtcaattctcttgaaccactcaggcaggccgtgagttcatatattcggagaactgggcagggcattgtcatggatgaagagaaagacaaggacatggtgccatcattgttagaatttaaggcttcacttgacttaatatgggaagaaagcttttcgaagaatgaaggattttgcaaccacattagggatgcatttgagcatctaattaacattcgtcagaaccgacccgcagaactgattgccaagtttctggatgaaaagcttcgtgctggtaataagggtacttctgaagaggaattagagggtacacttgataaagttttggttttattcaggttcatccagggcaaggacgtattcgaagcattctataagaaggatcttgcaaaaaggctgctgctaggaaagagtgcttctattgatgcagagaaatccatgatctctaagctgaagaccgagtgtggcagccagtttacgaacaaacttgaaggaatgttcaaggatattgaactatcaaaggagataaatgaatcattcaagcaatcatcacaggccaggacgaaacttccatctggaatcgagatgagtgtccacgtcttaacaaccgggtactggccaacatatccacctatggttgttcggcttcctcacgagttgaacgtctatcaggacatctttaaggagttctacttaagcaagtacagtgggaggcggttaatgtggcaaaactcgttaggtcattgtgtattgaaagccgattttaccaaaggtaaaaaggagctcgcagtttccttatttcagactgtagttctgatgttgttcaacgatgccgagaagcttagctttcaagacattaaggactctactgccatagaggataaggaattgagaaggaccttgcagtcccttgcatgcggtaaagtacgagtcctgcagaagttgccaaaagggagggaggtggaagatgatgattctttcgttttcaatgaaggattttctgctcctctctatcgtataaaggtaaatgcaatccagatgaaagagacagtggaggaaaacacgagtactaccgaaagagtatttcaagaccgtcaatatcaggtcgatgctgctattgttcggataatgaagacaaggaaagtgttgagccacacccttttgataaccgaactcttccaacagcttaagtttccgataaaaccggctgatttgaagaaaagaatcgagtctctcatcgacagggagtacctggaacgagacaagaacaatccacaaatatacaattacttggcataaactttgattttctttcaaaatcccattgttagatccatgtacagtaatttgtagtaattgagattgtaattgtaaagaaaatttctagactcttctatccttatttttatgcttatttattgcatatataaacaaataattgaat

SEQ ID NO: 1540 - DNA, 2655 bp, Gossypium raimondii
attcttacgacgatctctttgatcatcactttcatgtctttcaatctcctttcacaaaacgctctcttaagcaacgctgatcgttaatccccaaaacgccattgctgcttcttcttcttcatcatctgcaaatcatcaatgacgaaagcaaagtctcattcggtggctggttctatagacccaaacaaaaacggccttcatcaccaccatcaagacggtaacgacgtcgttttcgacccttcatctatgtccctcggcgatgattctaagtccggtgttcctcgttctcccgccaccgctaatctctctcgtaaaaaagcaaccccgcctcaacccgccaaaaagctcgtcatcaaattcgttaaagcaaaaccgacaatgcctacaaattttgaggaggagacatgggcaaagctgaagtcagccattaatgctatatttttgaagcagccagattcttgtgacttggagaagctttatcaggatgtcaataatctttgcctgcacaagttgggaggaagcctttatcagcgaattgaaaaagagtgtgaagaacatatatctgctgcactaagatctttggtagggcaaagcccagatctggttgttttcttatcactcgttgagaaatgttggcaagatctttgtgatcaaatgttgatgattcgtagtatagccttgtatcttgacagaacatatgttaagcaaaccccaaatgtacgttcattatgggacatgggcttgcagctcttccgaaaacatctttctctagctcctgaagttgatcacaaaactgttactggccttttaagaatgattgagagtgagaggttaggagaagctgtcgacagaacactcattaaccatcttttgcagatgttcaccgccttaggcatttactcaggaagctttgagaagccattcctagagtgcacgtctgagttttatgcggctgaaggaacaaaatacatgcaacaatatgatgttccagattacctgaagcatgttgagactaggttacatgaagaacatgaaagatgcttactctacctgggtgatcttacaagaaagccactaatagcaacagtggaaaggcaactccttgaacgtcatatacatgccattcttgataagggatttatgatgcttatggatggacaccgtattgaggaccttcagaggatgtactcactgttttcaagggtcaattctcttgaaccactaaggcaggccgtgagttcatatattcggagaactgggcagggcattgtcatggatgaagagaaagacaaggacatggtgccttcattgttagaatttaaggcttcacttgactcaatatgggaagaaagcttttcgaagaatgagggattttgcaaccacattagggatgcatttgagcatctaattaacattcgtcagaaccaacccgcagaactgatcgccaagtttctggatgaaaagcttcgtgctggtaataagggtacttctgaagaggaattagagggtacacttgataaagttttggttttattcaggttcatccagggcaaggacgtattcgaagcattctataagaaggatcttgcaaagaggctgctgctaggaaagagtgcttctattgatgcagagaaatccatgatttctaagctgaagactgagtgtggcagccagtttacgaacaaacttgaaggaatgttcaaggatattgaactatcaaaggagataaatgaatcattcaagcaatcatcacaggccaggacgaaacttccatctggaatcgagatgagtgtccacgtcttaacaaccgggtattggccaacatatccacctatggttgttcggcttcctcacgagttgaacgtctatcaggacatctttaaggagttctacttaagcaagtacagtgggaggcggttaatgtggcaaaactcgttaggtcattgtgtgttgaaagccgattttaccaaaggtaaaaaggagctcgcagtttccttatttcagactgtagttctgatgttgttcaacgatgctgagaagcttagctttcaagacattaaggactctactgccatagaggataaggaattgagaaggaccttgcaatcccttgcatgcggtaaagtacgagtcctgcaaaagttgccgaaagggagggaggtggaagatgatgattctttcgttttcaatgaaggattttctgctcctctctatcgtataaaggtaaatgcaatccagatgaaagagacagtggaggaaaacacaagcactaccgaaagagtatttcaagaccgtcaatatcaggtcgatgctgctattgttcggataatgaagacaaggaaagtgttgagccacacccttttgataaccgaactcttccaacagcttaagtttccgataaaaccggccgatttgaagaaaagaatcgagtctctcatcgacagggagtacctggaacgagacaagaacaatccacaaatatacaattacttggcataaactttgattttctttcaaaatcccattgttagatccatgtacagtaatttgtagtaattgagattgtaattgtaaagaaaatttctagactcttttatcctcatttttatgcttatttattgctatataaacaaataattgaatttatttcttaaa

SEQ ID NO: 1541 - DNA, 2978 bp, Gossypium raimondii
aacatttttcatctttcagctgccttctctcgttatcttcccctatatctatatgatgtatactgtaaaaataaaataaaaagagtgaataaaaatcaaattaaattaaatagttgaagctgaagattttacaatgctttcttgatcacttttcatgtctctccccccaaccaaacgctctcttagctccaacgccgctgttgcttcttcttcttcttcttcttcctcttcttctcactttcaaccgtcaatgaagaaagccaagtcccaagccgtggcttgttctcttgaccccaataagaacggccttcacaaccaccacaacaaccaaggcgataacgacgtcgtcttcgacccttcttcacctatgtccctcgacgacgattccaagtccgacgatgctcgcgctcccgccgccgccaatttgtctcgcaaaaaggctaccccacctcaacccgccaagaagctcgtcatcaaattcgttaaagcaaaaccgacagtgcctacgaattttgaggaggaaacgtgggcaaagctgaagtcagccattaatgctatttttctgaagcaaccagattcatgtgacttggagaagctttatcaggctgtcaatgatctttgcctgcataggatgggaggaagtctttatcaacgaattgaaaaagagtgtgaagcacgtatatcggcagcattaagatctttggttgggcaaagtccggacctcgtggttttcttatcgcttgttgagaaatgttggcaagatctttgtgatcaaatgttgatgattcgtggtatagccttgtacctggacagaacatatgttaaacaaaccccaaatgtacgttcattgtgggacatgggcttgcaacttttctgtaaacatctttctctggctccagaagttgagcacaaaactgtcaccggtcttttaagaatgattgagagtgagaggttaggtgaagcagttgacagaacactacttaaccatcttttgaagatgtttactgctttaggtatttactcagaaagctttgagaagccattcctggagcgtacatccgagttttatgcagctgaaggaatgaaatacatgcagcaatctgatgttccagattacttgaagcatgtagagatgaggttaaatgaagaaaatgaaagatgcttactctacctggatgctcttacgagaaagccgcttatagcaacagcagaaaggcaactgctggaacgtcatatacctgccattcttgataagggatttatgatgctgatggatggacaccgtattgaggaccttcagaggatgtactcactgttttcaagggtcagtgctcttgaatcactcaggcaggccctaagctcatatattcggagaactgggcagagcattgtcatggatgaagagaaagacaaggacatggtgtcttccttgttagaattcaaggcttcacttgactccatattggaagaaagcttttccaagaatgaggcattttgcaacaccattaaggattcttttgagcatctaattaatcttcgtcagaatcgacctgctgagcttattgctaagtttctggatgaaaagcttcgtgctggtaataagggtacttctgaagaggaattagagggtacacttgataaagttttggttttattcaggttcatccagggcaaggatgtttttgaagcattctataagaaagatcttgctaaaaggctgcttttagggaagagtgcttctattgatgcagagaaatccatgatttctaagctgaagacagagtgtggcagccagtttacaaacaaacttgaaggaatgttcaaggatattgaactgtcaaaggagataaatgaatcattcaagcagtcatcccaagccaggacaaaacttcgatcaggaattgagatgagtgtccatgtcttaacaactgggtactggccaacatatccacctatggatgttaggcttccacatgaattgaatgtctatcaggacatcttcaaggagttctacttgagtaagtacagtgggagacgcctaatgtggcaaaattcattgggtcattgtgtgttgaaagcagatttttccaaaggtaaaaaggagctggcagtttccctgttccagactgtagttctgatgttgttcaacgatgcccaaaagcttagctttcaagacattaaagactccactggcattgaggacaaggaattgagaaggaccctgcagtcccttgcatgtgggaaagtgagagtcctgcaaaagttgccaaaagggagagatgtcgaagatgatgattctttcattttcaacgaaggatttactgctcctctctatcgtataaaggtaaatgcaatccagatgaaagagacagtggaggagaacacaagcaccactgaaagagtatttcaagaccgtcaatatcaggttgatgctgctattgttcggataatgaagacgaggaaagtgttgagtcacactcttttgataactgaactcttcgaacagctaaagtttcccataaaaccggctgatttgaagaaaagaatcgagtctctcattgacagggagtacctggagcgggacaagaacaacccacaaatatacaattatttggcataagctttttttttttttttgtttctttctttttataacagaaagctccttgtaaaatgacaggggaaactatggtcttttctctaaggggccggaggtgaaatccatgtacagtaacatgtaggttctttgttttttgttgttgcaatcgagattgtaattgtaaagcatatttagactctcatttgataccttacttgttacggtacttgaaataagctacattttttccctggctcttgttttattttctttagaagagaatttctttttattttttattatgttaaagctgtatgccatgttcgttaatgggattcgcctttgctgctactttacgagtataaaatatttggttagt

SEQ ID NO: 1542 - DNA, 2787 bp, Panax ginseng
atcatcttccctagctatacaatgagctcttagatttttcacttctatgtctcaacaacccagctccaccaccaactccaataagcgctcatcctacaccaacacaacctccaccacttccggcagcggcggcgccaccgaaggaccccgttttccggcgatgaagaaggccaagtctcaggccgttgcttcctctcttgactcctcccccaccaataaaaacggcctccaacacgtccgtttcaacaccgaaatggatgactccatgatcgaagatcccaaccctaacgacgtcgttgatccctcctcgcctgctggttcccgagcctccgccggtggcgttaccgccaatttggctaggaagaaggctactccacctcagcctgcgaaaaagcttgttattaagcttctcaaagctaaaccgacgttacctacaaattttgaggagaatacatgggcaacattgaagtcagcaattagtgccatattcttgaagcaaccagatccttgtgatttggagaagctctatcaggctgtcaatgacctttgtctacacaaaatggggggaaatctatatcaacggattgaaaaggagtgtgagacgcacatatctgctgcattacaatctctagttggccagagcgaggatctagtggttttcttatcgcttgttgagaagtgctggcaagatttttgtgatcaaatgttgatgatacgtggtatagccttgtatctagatcgaacttatgtgaagcagactccgaacgtgcgttcattatgggacatgggtttgcagctattccgcaagcatctgtccctagcttcagaagttgaatacaaaactgtatttggccttcttaaaatgatcgagagtgagaggctaggtgaagcagtggataggactctccttaatcatctattgaagatgttcactgcgttaggaatttactctgaaagctttgagaagccattccttgaacgtacatctgagttttatgcgtctgaaggtgtaaaatacatgcaacagtcagatgttcctgactacttgaaacatgtggagataaggttgcatgaagaaaatgacagatgcttactttacttggatgtcagtacaagaaagccactggtagcaactgcagaaagacaactccttgaacgacatatttctgcaattcttgataagggttttatgatgctgatggatggaaatcgcattgaggatcttcaaaggatgtacttgcttttctgtagagttaatgcccttgaatcattaaggcaaggacttaactcttatattcgaaggacagggcagggaatcgttgtggatgaagagaaggacaaagatatggtgtcttgcctcttagaattcaaggcatctctcgatacaatatgggaagaaagcttttctaagaatgaagcattttccaacactgtaaaggatgcatttgagtttctcattaatcttcgtcagaaccgtcctgctgaattgattgccaagtttttggatgagaagctccgtgcgggaaataagggtacatcagaggaagaactggagggaatgcttgataaagtactagttctgttcagatttatacagggtaaggatgtatttgaagcattctataagaaggacctcgcaaaacgactactgttaggaaagagtgcttctattgatgcagaaaagtcgatgatttctaagttaaagacggagtgtggcagtcagtttaccaacaaacttgaagggatgttcaaggacattgaattatcaaaagagataaatgagtctttcaagcaatcatctcaagctaggacaaagctcccatctggaattgagatgagtgtccatgtcttaacaacagggtactggccaacatacccccctatggatgttcggcttccccacgaactcaatgtctatcaggacattttcaaggagttctacttaagcaagtacagtgggaggcgattaatgtggcaaaattcattaggtcactgtgtgttaaaagcagaatttcctaaaggtagaaaggagctggcagtttccctatttcagaccgttgtactgatgctgtttaacgatgcccaaaagcttagttttcaagatatcaaggatgctactagcatcgaggataaggagctgaggaggactctacagtctcttgcttgtggaaaagtccgtgtgctccaaaagtttcccaaagggagagaagtggatgatgatgattcattttcattcaatgatggatttactgctcctctctatcgtataaaggtaaatgctatccagatgaaggaaacagtggaggagaacacaagcaccactgaaagagtattccaggaccgtcaatatcaggttgatgctgctattgttcggataatgaagacgaggaaagtgcttagtcatacactactgataactgaactttttcagcagctcaagtttccaatcaaaccagctgatttgaagaaaaggattgagagcctcatcgacagggagtatctggagcgggacaagagtaatcctcagatatacaattacctggcataatccgccatgcctatttcttgtaaatgactagggaaatcttcagttctctctacaagaacactcccatgtcagattttgtacaggaacttttagtctttattttcagtttttttttaaaactgttgtactctctttctgtaaagcatatcttgtttttgtatgtttcatgaagttcgatcttacttctgttaaagtatacattaaatagttgaatctctttataagaactggaacctttt

SEQ ID NO: 1543 - DNA, 2893 bp, Prunus persica
tctctctcttctctctttctccctctatctctttcacttacaatgcgctgttaatgagtttgatgtctcaccccacaaaacgctcctcagccatcaacaacaacaccagcagcagcacctcctcctctctcaacccttcttcaggcccacccatgaaaaaggccaagtctcaggccgtcgcctgttccctcgatcccagcaagaatggcctccaccaccaccatcaccaccatcctcacactcacccttctcaagaccccgataacgacgtcgtattcgacccctctaccatggccctcgacgaagatctcaagtccgacgacccctcttcccgtgccgtcgccgccaatttgtcccgcaaaaaggcccagccccctcagccaaccaagaagctcgtcatcaagctcctgaaagctaaacccacgttgcccacaaattttgaagaggaaacatgggcaaagctgaagtcagccatttgtgctatatttttaaagaaacctgattcttgtgactcggagaagctttatcaggccgttaatgatctttgcctgcacaagatgggaggaagtctttatcaacgaattgaaaaggagtgtgaaagacacatagctgcggcactgcaatctttggttggccaaagcccagacttggtggtttttttatcacttgttgagagatgctggcaagatctttgtgaccagatgttgatgattcgcggtatagccttgtatcttgatcgaacatatgtgaaacaaacaccaaatgtgcgttcattgtgggacatgggactgcagctttttcgtaaacatctttctctgtctccagaagttgagcacaaaactgtcacgggcctcttaagactgatcgagaaagaaagattgggtgaagcggtggctaggactctgcttaaccatcttctgaagatgtttacagctttaggaatctactcagaaagctttgagaagccatttcttgagtgcacttcggaattttatgccgctgaaggtatgaaatacatgcagcaagcagatgttccagattacttgaagcatgtggagacaaggttgcatgaagaacatgaaagatgtttaatctacctggatgcaagtacaaggaagccattagttgcaacagccgaaaagcagcttttagaacgccatatacctgccattctcgacaagggatttacattgctgatggatgggaatcgaattgaggatcttcaaaggatgtacactcttttctctagagtcaatgcccttgaatcactgaggcaagcgcttagtacatacattcggaggacagggcagggcatgatcatggatgaagaaaaagacagagaaatggtttcttcccttttggaatttaaggcttctcttgacactatatgggaagaaagctttttcaagaatgaagcattttgcaacaccataaaggatgcatttgagcatcttattaatctccgtcagaaccgacctgctgagctgattgcaaagtttttggacgagaagcttcgtgctgggaataagggtacttctgaagaggaactggagggaatgctggataaagtcttagttttattcaggttcatacagggcaaggatgtatttgaagcattttataagaaggatcttgcgaaaagactacttttgggaaagagtgcttctatcgacgcagagaaatctatgatttccaagctgaagactgagtgtggcagtcagtttacgaacaaactcgaaggaatgtttaaggatattgaattgtcaaaagagataaatgagtccttcaaacaatcatcccaggccaggacaaagctcccgtcagggattgagatgagtgttcatgtccttacgactgggtactggccaacatatcctcccatggatgttagacttcctcatgaattgaatgtctaccaggatatcttcaaagagttttacttaagcaagtacagcggtaggcgtttaatgtggcaaaattcattaggtcactgtgtgttgaaagcagagtttcccaagggtaaaaaggagcttgcagtttctctgtttcagactgttgtgttgatgctgtttaatgatgctgagaagctaagccttcaagacattaaggattcaactggcattgaggacaaggaattgagaagaactctgcaatcccttgcatgtggaaaagttcgcgtcctgcaaaagtttcccaaagggagagatgtggaggatgacgatacatttacgttcaatgacggatttactgctcctctctaccgcataaaggtgaatgcaatccaaatgaaggaaacagtggaggagaacacgagcaccactgaaagagtatttcaagaccgccaatatcaggttgatgctgctattgttcggataatgaaaactaggaaggtgctgagccacactcttctgataacagaactgttccaacagcttaaatttccgataaagccggcagatttgaagaaaaggattgaaagcctgattgacagggagtacctagaacgggacaagaacaaccctcaaatttacaactacctagcgtaagaaaatataagaaaaaaattgcagcagattttggagtttctccatgtaaatgacacgggaatatctcttctgtcttcaagaggaagagaagggaagagggaagaggcacaggatgtgaagtccagtcccctgtctgtctttgtttttatgtacagtgaccttggtagtttttttttcttctttttcaatttttgttgcggtcaatacgattgtaaagaacattttagtctcccctttcatatttatattcatgcgaaagagtctagtacttgaagaaatcaattgcagatattctttcttcttctgttttctatttctgaaatagggttatattatatgtaaacaaa

SEQ ID NO: 1544 - DNA, 2408 bp, Tabernaemontana elegans
aagatcctacaaatctgtctagcgacgtcgttatggaccccggcagtattagtaatttcaacggtggtcctgttacccgctcctccggtactgctaatttatcgaggaagaaggctactcctcctcagcctcagaagaagctcgtcattaagcttcttaaaggtaaacctacactgccctcgaattttgaagaaaccacatgggcaacactaaaatctgctatcaatgctatattcttaaagcaaccagatccttgtgacctggaaaagctttatcaggcggtaaatgacctttgtctgcataaaatggggggaagcctctatcaacgaattgaaaaggagtgtgaagcacacatatctgctgcattacaatcattagtcggacaaagtgaagatttggtggttttcttgtcacttgtggagaagtgctggcaggatttctgtgaccagatgttgatgatccggggtatagctttatatcttgatcgaacatttgtgaagcaaactccaaatgtacgttcactgtgggacatgggtttgcagcttttccgaaaacatctttccctggcatcagaagtggaacacaaaactgtatttggcctcctgaaaatgattgatagtgaaagattaggtgaagcagttgatagaaccctccttaatcatcttctgaagatgtttaccgcattaggaatttatgcagaaagctttgagaagccatttcttgagcgcacatctgagttttatgctgctgagggtgttaaatacatgcagcagtcagatgttccagattacttgcgacatgtggagataaggttgcatgaagaacatgagagatgcttactctacctggatgctggtacaagaaagccattagtagcaactgcagaaaggcaacttcttgaacggcatatagctgcaattcttgataaaggttttatgatgcttatggatggccatcgtattgaggatcttcagaggatgtatacactcttctccagggtcaatgccctggaatcattaaggcaggcacttaactcatacattcgaagaactgggcatggtattgtcatggatgatgaaaaagacaaagatatggtgtccagtctcttagaattcaaggcatctcttgatacaatatgggaggaaagcttttccaagaatgaagcatttagcaacaccataaaagatgcatttgagtatctaattaatcttcgccagaaccgacctgctgaactaattgccaaatttttggacgagaaacttcgcgctggaaataagggtacatcagaggaggaattggagggtacacttgataaagtcttggttctattcaggtttatacagggtaaggatgtatttgaagcattctataagaaagatcttgctaaaaggctactgttaggaaagagtgcatctattgatgcagagaagtccatgatatcaaagctaaagaccgaatgcggcagccagtttactaacaaactggaaggaatgttcaaggatatagagttatccaaggaaataaatgaatctttcaagcaatcgtcccaagctcggacaaaacttccttcaggaattgaaatgagtgttcatgtcctgacaacagggtactggccaacatatccacccatggacgtgcggcttcctcacgaactcaatgtctatcaggatattttcaaagaattctatctaagcaagtataatgggagaagattaatgtggcagaattcgttgggtcactgtgtgctaaaagcagagtttccaaaaggaaaaaaggagctggcagtttctctatttcaaacagtagttttaatgttgtttaatgatgcacaaaagcttagctttcaagatatacgagaatccactggcattgaagacaaagagctgcgaaggactttacagtcccttgcatgcgggaaagttcgtgttcttctgaagattccaaaaggccgagatgtggaagatgaagattcctttgtgttcaatgaccaattcagtgctcctctgtaccgtataaaggttaatgccatacaaatgaaggaaacagttgaggagaatacaagcaccactgaaagagtattccaggaccggcagtatcaggtggatgctgcaattgttcggataatgaagactaggaaggtgctgagtcacacactattgataactgaactttttcaacagctgaaattccctataaaaccggcagacttgaagaaaaggatagaaagcctgatagacagggagtaccttgagcgtgacaagaacaatcctcaaatatacaactatttagcataagtgatcacaagatgcttgaggtttttcttgtaatggcttgggaaagcaatgtcttgattaagatgctgccagttcccatctcagaatgtgtatagtaaacttgtagacgtctta

SEQ ID NO: 1545 - DNA, 2723 bp, Euonymus alatus
gcctcgattacatttttcgggcttttcttcttcctcagaatgccctcctgatccttcatcactttcatgtctctccccaccaaacgctctgcccacaacaccaccaccagtagcagctcaacctcccattttgcccctatgaagaaggccaagtcgcaggcagtggcctgctccctcgactcctccaacaagaacggcctccaccaccatcgccaccagcacgcttccgccgatgatgaagtcgtcttcgacccctcttctatggccatggacgaagatctcaagcccgaggatcgtgtccctcctcacgccgccaatctctcacgcaaaaaggctacccctcctcagccccctaagaagctcgttattaagttcgttaaagccaaaccaacgctgcccaccaactttgaggagaatacatgggcgatgctaaaggctgctattgaagctatattcttgaagcaaccaaattcttgtgacttggagaagctttatcaggctgtcaatgatctttgcctgcacaagatgggggggaatctttatcaacgaatagaaaaggagtgtgaagcacatatatctgctgctttgctttctttggttggtcagagtcctgatttggtggtcttcttatctcttgttgagagatgttggcaggatctatgcgatcagatattgatgattcgtggtatagccttgtttcttgatagacatatgtgaaacaaaccccaaatgtgcgatcactatgggacatgggattgcaacttttccggaaacatctttctttgtctcctgaagttgagcacaaaactgtaactggacttttaagaatgattgagagcgaaagattaggtgaagcagttgatagaacactcttgaatcatcttttgaagatgtttactgcgctaggattttactcagaaagctttgagaagcctttccttgattgcacatctgaattttatgctgcagaaggcatgaaatacatgcagcaagccgatgttcctgactacttgaaacatgtggagttaaggttgcatgaagaacatgaacgatgcttactctacctggatgcaagtacgaggaagccgcttatagctactgctgaaaggcagcttcttgaacaacatatatctggcattcttgataaggggttcatggcactaatggatgggcatcggattgaggaccttcagaggatgtattcactgttctctagggtcaatgcccttgaaactttgaggcaggcccttaattcatacattcgaagagttggtcagggcattgtcatggatgaagaaaaagacaaggacatggtttcgtccctgttggaattcaaggcctctcttgacacaatatgggaagatagcttttccaagaatgaagcattttgcaacaccattaaagatgcatttgagcatctaattaatcttcgccagaacaagcctgctgagctgattgcgaagtttttggatgagaagctccgtgctgggaataagggtacttctgaagaggaattggagggcacacttgacaaggtcttggttttattcaggtttattcagggcaaagatgtatttgaagccttctataagaaggatctcgcgaaaaggctattgttgggaaagagtgcatctatagatgcagagaaatctatgatttccaagcttaagaccgagtgtggcagtcagtttacaaacaaacttgaaggaatgtttaaggatattgaattgtcaaaggaaataaatgaatcattcaaacaatcatcccaggccaggacaaagcttccctcggggattgagatgagtgttcatgtcttaacaacagggttctggccacgtatccacctatggatgtgaggcttcctcatgagctgaatgtctatcaggacattttcaaggaattctacttaagcaagtacagtgggaggcgcttgatgtggcaaaattcattaggtcactgtgtattgaaagcagagtttcccaaaggtaaaaaagagctggcagtttccctgtttcagactgttgtcttgatgctctttaatgatgcacaaaagcttagctttcaagatattaaggatgctacaggtatagaggacaaggaattgaggaggactctgcagtccctcgcatgtggaaaagttcgtgtcctgcaaaagttgcccaaagggagggatgtcgaggatgacgactcatttgagttcaatgaaggatttattgctcaactctttcgtataaaggtaaatgcaattcagatgaaagaaacagtagaggaaaacacaagcactagcgagagagtatttcaggaccgccaataccaggttgatgctgccattgttcgtataatgaagacaaggaaagtgctaagtcacacccttctgataactgaactctttcagcagctcaaatttcccataaagccagcagatttgaagaaaagaattgaaagccttatcgacagggagtacctggagcgggacaagaacaacccccaaatttacaattacttagcatagttttgtcacatatgataatatctttccttgtaaaaatcagagaaaacttcaggcctctacaagtagagtttcctgtgagatttatcatttatgtacagtaactaccagttctttttcagttatgctgtgcaaagcatatttagaatttggtttcatctggtggtgttgtataattgaatcttgaaatctgatgactagaaatcaatcattg

SEQ ID NO: 1546 - DNA, 2668 bp, Manihot esculenta
tatcttttttttttgggttaatgtctccccccaccaaacgctcagccacttccaccgccaccacctctagcacctctaccagcgccaccgctaattttcctcccatgaagaaggccaagtctcaggccgtctctgcttgctcccctatcgacccttctagtaacaaaaacggcctccatcacgtcctctccggcactactgcagataacgacgtcgtattcgacccctcttccatgactctcgatgacgatcccaagctcgacgaccgttcccctcctcccgccgccaatttatctcgcaaaaaggctactcctcctcagcccgcgaagaagcttgtcattaagctcttgaaagctaaaccaacactgcctgcaaattttgaggaggatacttgggcaacgctgcagtcagctattaaagctatattcttgaagcaaccagattcctgtgacttggagaagctttatcaggctgtcaatgatctttgtctgcacaagatgggtggtaatctttatcagcgaattgaaaaggaatgcgaggcacacatacatgcagcactacaatctttggttggtcaaagcccagatttggtggttttcttatcacttgttgagagatgctggcaggatctatgtgaccaaatgctgatgattcgtggtatagccttgtatctagatagaacctatgtgaaacaaactccaaatgtacgttcactgtgggacatgggtttgcagcttttccggaaacatcttgctttgtctcctgaagttgagcacaaaattgtcacaggccttttgcgaatgatcgagagggaaagaactctcctaaaccatcttttgaagatgtttactgctttaggaatttatgctgaaagctttgagagaccatttctggattgcacatctgaattctatgctgctgaaggcatgaaatacatgcagcaatcagatattccagattacttgaagcatgtagagatgaggttgcatgaagaacatgaaagatgcttactctatcttgatgcaagtactagaaagccattaatagcaactgcagaaaggcagcttcttgaacgtcatatatctgcaattctggataaggggttcatgatgctaatggatggccacagaattgaggatcttaagagaatgtactcattgttcttaagggtcaatgcccttgaatcattaaggcaggcccttagctcatacattcgaagaactgggcaaggcattgtcatggatgaagagaaagataaggatatggtttcatccttgttagaatttaaggcttctcttgacacaatatgggaggaaagcttttctaagaatgaagtattttgcaataccataaaggatgcatttgaacatctaataaatcttcgtcagaaccggccggctgagctgattgcaaagtttttggatgagaagcttcgggctggaaataagggaacttccgaagaggagttggagggtacacttgatagagttttggttttgttcaggtttattcagggcaaggatgtgtttgaagcattttataagaaagatcttgctaaaagactactattgggaaaaagtgcttctattgatgcagagaaatctatgatatcaaagctcaagactgagtgtggcagccagtttacaaacaaacttgaaggaatgtttaaggatattgaactatcaaaggagataaatgaatccttcaaacaatcatcccaggccaggacaaaacttccatcagggattgagatgagtgtccatgtcttaacaacagggtactggcctacgtatccaccaatggatgttcggcttcctcacgagctgaatgtctatcaggatattttcaaagaattctacttgagcaagtatagtggcaggcgcttaatgtggcaaaattcattgggtcactgtgtgttgaaagctgaatttccaaaaggtaaaaaggagctggcggtttctctatttcagagtgtcgtgttgatgttgtttaatgatgcccaaaagcttagctttcaagatattaaggatgccactgccatagaggacaaagaactgagacggactttgcagtctcttgcatgcggaaaagttcgtgtcctacaaaagctgcctaaaggacgggatgtggaggatgatgattcatttgtcttcaatgagggatttacggctcctctatatcgtataaaggtgaatgcaatccaaatgaaggaaactgtagaggagaacacaagcaccactgagagagtatttcaagaccgccaataccaggttgatgctgctattgttcggataatgaagactaggaaagtactaagtcacacacttctgattactgaactcttccaacaggcaagttttcccatcaagccagctgatttgaagaaaaggatagagagcctgatcgacagggagtacctggagcgagacaagaacaaccctcagatatacaattacctggcataatcctttttcctatactaaaagaaaagctctccttgtatatgggagacgattcaagccctgtcaaatcaatgtacagtttacctgtagtgctttaattttcttgcattttcaacactataattgtaaagcatatttagcatctcctttatgttgtaagactttttgagttgcttcaaataagttgagctttttttcaaacggaa

SEQ ID NO: 1547 - DNA, 2596 bp, Eucalyptus grandis
atgaagaaagccaagtcccaggccgttgccggttccctcgactccactaccgcccacaagaatggcctccacccacatcctgccaagcagcagtcgcagcagccaggattcgatcccgagagcgatgtcgtctttgatcctgcgaccatgtctcttgaagacggcatgaagtcggacgacatggtggcagggcacagcgtcgccgccaatttgtctcgaaagaaggctacgcctccgcagcctgccaagaagctcgttatcaagcttttaaaagccaagccgacacttcccacaaattttgaagaggatacatgggcaaagctcaaagcagctataaatgcaatattcttaaagcaacctgtttcctgtagtttggaggattattatcaggctgtcaacgacctctgcctacacaaattggggggaaatctttatcaacgaattgagaaagagtgtgaaacacatatttcagcggtgctgcagactctcgtcggccagagcccagatttggcagtttttttatcacttgttgagagatgctggcaggatttctgtgaccagatgctgatgattcgcggcatagccttatatttggatagaacctacgtgaagcaaaacccaaatgttcggtcgttatgggacatggggttgcaacttttccgaaagcatcttcatttgtcagtggaagttgagcataaaactgtcaccggtctcttaagaatgattgaaagggaaaggttgggtgaagcagttgatcggacacttcttaatcatcttctgaagatgtttacagctctaggaatttatgcagaaagttttgagaagccattccttgagtgcacatccgaattttatgcggctgaaggcatgaagtacatgcagcagtcagatgttccagactacatgaaacatgtggaggttaggttgcatgaagaacatgagaggtgcttgctctaccttgatgctagtacaaggaagcctctaattgctactgcagaaaggcaacttctagaacgacatatacctgctattcttgataagggattcatgatgctgatggatggaaatcgtattgaggaccttcagagaatgtaccaattgtttgcaagggtaaacgccttggagtcattaagacaagcacttagcttgtacatacggcaaactggtcagggtattgtcatggatgaagaaaaagataaggacatggtgccgtctcttttggagtttaaggcttctctagatgcaatatgggaggacagtttttcgaagaatgaaatgttttgcaacactgtcaaggattcatttgagcatctaatcaatcttcgtcagaaccgaccagctgagttaattgcgaagtttcttgatgaaaagttgcgtgctggtaataaaggaacctcagaagaggaattggagagtatacttgataaagttctggttttgtttaggttcatccagggaaaagatgtgtttgaagcattctacaagaaggatcttgcaaagagactgttattggggaagagtgcttccattgacgcagaaaaatccatgatcacaaagctgaagaccgagtgtggtagtcagttcacaaacaaacttgaaggaatgttcaaggacatcgagttatcaaaagagataaatgaatcattcaagcaatcgtcacaagcgaggacaaaactaccatcaggaattgagatgagcgtccatgtgctgactacagggtactggcccacttatccaccaatggatgtaaggcttcctcatgaattgaatgtttatcaggacatatttaaggagttttaccttagcaagtatagtgggagacgtctaatgtggcagagttcattaggtcactgtgtactgaaggcagattttccgaaagggaggaaagagctggctgtttccctatttcagacagttgtcttaatgctatttaacgatgctcagaagcttagttttcaagatataagagactctacaggcattgaggataaggaactgagaagaactctgcaatcccttgcctgtggaaaagtgagagtccttcagaaggtgcccaagggcagggatgtggaggatgatgattctttcgagttcaatgaagcttttagtgctcctctttatcgaataaaggttaatgctatccaaatgaaggaaacagtggaggagaacacaagtaccacggaaagagtatttcaggaccgtcaatatcaggttgatgctgccattgttcggataatgaagacaaggaaagtgcttagccacacgcttttgataactgaactgtttcagcagctcaaattccctatcaagccagctgatctgaagaaaaggatcgaaagcctgattgacagggaatacctggagcgggacaagaacaatcctcaaatatacaattacttggcttagtcaaatgtgctattttgactcagaagatgtcactgtatatgaccaatgacatgaaagttaggctgctcttttggatttggaaagcttaacccccccccccccaatcggattttattgtacagtttgggctgatcaggatcaattttaccgcctttggagagcatattttaatgcaatcaccatttctttt

SEQ ID NO: 1548 - DNA, 3154 bp, Populus trichocarpa
attttcttctgaaatctttatttaccttttctatcttcccctcttttttctatcttcccttctttctttctaggtgatagtatacaaaacgatgccctcttgataaacacagagatcactttattttgttaatgtctctccccaccaaacgctcagccacaaccagcgccagcactagcacagccagcacttccgcctcaaataatttccttccaatgaagaaggccaagtcccaggccgcctccgcctgttctcctctcgaccacaacaaaaacggcctctatcactctgacgatgtcgtcttcgatccttcttccatgtctctcgacgacgatctcaagctcgtcgactaccgcactcctcccgccgctgctaatttatctcgcaaaaaagccacccctccacaacccgctaaaaagctcgtaattaagctcgtcaaggctaaaccaactctgcctacaaattttgaggaggacacatgggcaaagctgcagtcagctattaaggctatattcttgaaacaaccagctctttgtgacttggagaaactttatcaagctgtcaatgatctttgtctgcataagatggggggaaatctctatctgcgtattgaaaaagagtgtgaaacacatatatctgcagcattacaatccttagttggtcaaagcccggatttggtggtcttcttaaagcttgttgaggagtgctggcatgatctctgtgaccagatgttgatgattcgtagtatagccttgtatctggacagaacatatgtgaaacaaactccaaatgcacgttcattgtgggacatgggtttgcagcttttccgaaaacatctttctttgtctcctgaagttgagcacaaaactgtcaccggcctcttgcaaatgattgagagggaaagattaggtgaaacagttaataggaaaccccttggccatcttttgaagatgttcacttcactaggaatttatgcagaaagttttgaaagaccattccttgagtgcacatctgaattttatgctgccgaaggcatgacatacatgcagcaatcagatgttccggattacttgaagcatgtggagtcgagattgaatgaagaacaagatcgatgcaagatttaccttgattcaagcactaaaaagccactaatagcaactgcagaaagacagctacttgaacgccatatatctgctattcttgataaggggttcatgatgcttatgaatggacatcggattgaggaccttaagaggatctactcactgttcttaagggtcaatgcccttgaatcattaaggcaggcccttagcatgtacatccgaagaaccgggcagggcattgtcatggatgaagagaaagacaaagatatggtttcctccttgttagagtttaaggcttgtcttgattcaatatgggaagaaagcttctccaagaatgaaggattttgcatcaccgtaaaggatgcatacgagcatttaattaatcttcgtcagaaccatcctgctgagctgatagcaaaatttttggatgagaagcttcgtgctgggaataagggtacttccgaggaggagttggagggtacacttgaaaaagttttggttttattcaggtttattcagggtaaggatgtgtttgaagcattttataagaaggatcttgcaaaaagactgctgttgggaaaaagtgcttctattgatgcagagaaatctatgatatctaagctgaagactgaatgtggcagccagtttacaaacaagcttgaaggaatgtttaaggatattgaactgtcaaaggagataaacgagtcctttaaacaatcatctcaggccaggactaaacttccatcaggaattgaaatgagtgtacatgtcttaactactgggtactggcccacatatccacccatggatgttaggcttcctcatgagctgaacgtttatcaggatatattcaaagaattctacttaagcaagtatagtggaagacgcttaatgtggcaaaattcattgggtcattgtgtgttgaaagctgagtttccgaaaggtaaaaaggagctggcagtttctctatttcagactgttgttctgatgctgtttaatgatgcccaaaagcttagttttcaagatatcaaagactctactggcatagaagacaaggaacttagaaggactttgcagtctctggcgtgtggaaaagttcgtgtcctgcagaagctgcccaaagggagggatgtggaggatgatgattcctttgtgttcaatgaaggatttgctgctccactctatcgaataaaggtaaatgcgatccagatgaaggaaaccgtagaggagaacacaagcaccactgagagagtatttcaggatcgtcaataccaggttgatgccgcgattgtccggataatgaagacaaggaaggtgctaagtcacacacttcttataactgaactattccagcagctgaagtttcctataaagccagctgatttgaagaaaaggatagaaagccttatcgacagggattaccttgagcgagacaagagcaatcctcagatatacaattacttggcctaacacactgtcacaccaattgtgtccttgtaaatggcacaggaaacttctgttctatccaaggggcagatgttcaatcctggtcagattaatgtacagtatgtttatttttgctgcaatcaatactgtaattgtaaagcgtattctgccccctctttcgacacttccctgctgctatttgatctttgagtcacttgagacaaggggcgaaattgattcaaacaaaaaaaaaaagaaaatggatggaaaataagctccgccagtgggttataggagtttggagaggtaagcagacagactggcattttcaccagccataagaattggagcattcacacctcaaaatgcacgattaatgttcaaatagaggtcagttctattcttattttacggccgtattaacagctcctgtgtcatttgaacgcttggttcttatgctgccctttgttttgttttatcatcttacatcaatctagtcccgctcgtacgactccattatcagtatagtccccaaaccttgcagcaccatcaattttgtcctaaacttggttgatattagactgtcatccatccaccggtaacaa

SEQ ID NO: 1549 - DNA, 2883 bp, Citrullus lanatus
tgggtgtgggcgtcctcacagaaatcaatcttcaatatttttctgtgctcaaaatttcctcttttctgcttcactggacaatgccctcctcttgatcactttcatgtctctccccaccaaacgctctgctaccgccaccgccaacgccaacaccgccgccgctacctccgtcctctcttcttcacccacttccaccgcctcttccatctcttcccctcctatgaagaaaaccaaatcccaaccacttgaccccaacaagaacggcctccacctccacgatgacgccgatttcgacccttcctccatggccctagatgaagatctcaagcccgatgactcccctctcattggcgctagtcgtgccgtcgcaaccaatttgtcgcggaagaaagccactcctcctcagcctgccaagaaactcgtcatcaagcttctcaaagcaaaaccgacactccctgccaattttgaggaggatacatgggcaaagttgaaatcagccatatgtgccatattcttgaagcaacctaattcttgtgatctggagaagctttatcaggctgttaatgatctttgcttgcacaaaatgggcggaaacctttatcggcggatcgaaaaggagtgtgaagtacacatatctgcagcattacagtctttggttgggcaaagccctgatttggtggttttcttgggatatgttgagaaatgctggcaagatttttgtgatcagatgttgatgattcgtggcattgcgctgtatcttgacaggacatatgtcaagcaaacgccaagtgtgtgctcattgtgggacatggggttgcaacttttcagaaaacatttatctttatcttcagaggttgagcacaaaactgttacgggtctgttaagaatgatcgagaaagaaaggctaggtgaagcaattaatcggactctcctcaaccacctgttgaagatgtttaccgcactaggaatttactcagaaagctttgaaaagccattccttgaatacacttctgagttttatgctgctgaaggcatgaaacacatgcagcagtcagatgtttcagaatatttaaagcatgcagagggaaggttgcaggcagagcaagatagatgtttgcactatcttgattcaagtacaagaaagccattgatagcaactacagaaagacaactccttgaacgtcatatatctgcaattcttgataagggttttacattgctgatggatgggaaccgaatgggagaccttctgagaatgtacacgcttatttcaagagtcaatgctctagaatcattaagacaagccctaagctcatatatacgaagaactgggcaaaatattgtcatggatgatgagaaggacaaagatatggtctcatcccttttagaattcaaggcttctcttgatacaatatgggaagaaagcttttccaagaatgaagccttttgcaatacaataaaggatgcgtttgagcatcttattaatcttcgtcagaatcgtcctgctgagctgattgcaaagtttctggatgaaaagcttcgtgctggtaataagggtacttctgaagaagagttggagggtacactggacaaagtgttggttctgttcaggtttattcagggcaaagatgtgtttgaagccttttacaagaaggatctagcaaagaggctacttcagagtgcttccattgatgcagagaagtctatgatttccaaactgaaaactgagtgtggtagtcagttcacaaacaaacttgaaggaatgtttaaggacattgaattgtctaaagagatcaacgaatctttcaagcaatcatcccaagcgaggactaagcttcccatggggattgagatgagtgttcatgttttgactactgggtactggccaacttatcctcccatggatgttaggcttccccatgagttgaatgtctaccaggacattttcaaggagttctatttgagcaagtacagtggcagacgcttaatgtggcataattcattaggccattgtgtgctgaaagccgagttccccaaaggtaaaaaggagttggcagtttccctctttcagacggttgtcttaatgcttttcaacgatgctgagaaactaagttttcaagatattagagaatctactggaattgaggataaagaactcaggaggactttacagtcacttgcctgtggaaaagttagagtgctacaaaagataccaaaaggtagagacgttgaggacaatgattcattcgtgttcaatgatggatttactgctccactctaccgtcttaaggtaaatgctattcagatgaaggaaacggtagaagagaataccagcactactgaaagagtctttcaggaccgtcaataccaggttgatgctgctattgttcgaataatgaaaacccgaaaagtgctaagtcatactcttctgattactgaactcttccaacagttaaagtttccaataaagccagctgatttgaagaagcggattgaaagtcttattgatagagagtacttagaacgtgacaagaacaaccctcagatatacaattaccttgcctaaaacagtcctttctcctcacaaacaacaccgaaatttcggccgttggaaggagggcgggatcggatcgacccctttgtcagattaatgtacagaaagaattttagtttccatatttttggtttgtgttggacgtagattgtaaagcataattttgtatctctttcaatgtctctgctgtctccggtaaagttgtgtacctgatgaaatcatcttatcaagcttacaccaaaaaagttatattgcaacaaagatcccaattgtagtttcatcaaagttcttttggttgtaggatatatagggggttattaggagtctag

SEQ ID NO: 1550 - DNA, 2712 bp, Lactuca sativa
ggcggcgacagcggcggcggcggaggagctcacttcttggcgatgaagaaggccaaatcacaggccgtatcttgctctttggacaacaaaaacggcttccagcaacatcaatttgataataatccatctgccgaaccttcttccatgatcgaagatcccactgaaaacgatgctggacgcgcatcctctgctggtggattcaccgccaatttggctcgtaaaaaagcaacgcctcctcaaccagctaagaagctcgtaatcaagctactcaaagccaagccaactctaccaacaaactttgaggagaacacatgggcagtcttgaagtcagccattagtgccatattcttgaagcaaccagatccttgtgatttggagaagctttatcaagctgtgaatgatctttgtctctacaaaatggggggaagtctttaccaaaggattgagagggagtgtgaagcccatatatctgctgctttaaattcattagttgggcaaagtgaagatcttgtggtgttcttatcacttgtgcagaaaacatggcaagatttttgtgatcaaatgttgatgatccgtggtatagcattgtatcttgatcgaacctatgtgaaacaaactccaactgtaagatcattatgggacatggggcttcaactatttaggaagcatttatcactagcttcagaagttgagcataaaacagtttttggccttctgaaaatgatagagagtgagagattaggtgaagcagttgatagaacactccttaatcatcttttaaagatgttcattgccttgggaatttactctgagagttttgagaagccattccttgaatgcacatcagaattctatgctgctgaaggagtaaaatacatgcaatactccgatgttccagattatttaaaacacgtggagataaggttgcatgaagaacatgacaggtgtctactctatcttgatgctactacaagaaaacctttggtagcaactgctgaaaggcaactccttgagctccatatttctgcaatactcgataagggtttcacaatgttgatggatgggaatcgaactcaagatcttagaagaatgtatacacttttccacagagtgaatgcccttgaatccttaaggcaagctcttagctcatacatcagaaaaacaggtcaaggcattgtgacagatgaagaaaaagacaaagacatggtcttctcccttttggaattcaaactctctcttgataaaatatgggaagatagtttttcaaagaatgatgttttttgcaacacaattaaagaagcctttgaacacctcatcaatctacgccagaatcggcctgctgagttgattgctaaatttttggatgagaaattgcgtgctggaaataagggtacatctgaggaagaattggagggaactcttgataaagttttggttcttttcagatttatacagggtaaggatgtgtttgaagcattctataaaaaggatcttgcaaaaaggcttcttttgggaaagagtgcatctattgatgctgaaaaatctatgatctccaagttgaaaaccgaatgtggtagtcagttcaccaacaagcttgaaggaatgttcaaggacatagagttatcgaaggagataaatgaatctttcaagcaatcatctcaagcaaggacgaaactaccctcgggaattgaaatgagtgtccatgtcttaacaactgggtattggccaacatatccaccaatggatgtccgccttccccatgaactcaatgtttatcaggacatatttaaagagttttacttgagcaaatacagtggtaggcgattaatgtggcagaattcattaggtcactgtgtcttgaaagcagaatttccaaagggcaaaaaagaacttgcagtttccttatttcagacagttgttttgatgctgttcaatgatgcacaaaagcttagttttcaagatattaaggatgctacaagcattgaggacaaagaactgaggaggactctccagtcccttgcttgtggaaaagtccgtgtccttcaaaagattccaaaagggagggaagtggatgacaatgattccttcatgtttaatgatgtatttactgctcctctttatcgtataaaggtcaatgctatccaattgaaggaaaccgtggaagaaaatgcaagcaccacagagagagttttccaagatcgtcaatatcaggttgatgctgctattgttcggattatgaaaactagaaaagttctgagtcatactcttctgataactgaactctttcagcagctaaagtttccaataaaaccagttgatttgaagaagaggattgaaagcttgattgatagggagtatttggagagagacaagagcaaccctcagatatacaattatcttgcatgaatccatccaatccaaatcaaatcaaatcaaatgaaaacttgtttgttttttttatcaaaggaatacattttccttggtctgtttatgtacagcgatagcttttgtttttaattgtaaagtctaatttgcgttgtgcttttcaccttatattcagagttccttactactattattctcatttcttaatcctactcttttgcccttatcggatttgtaaaacacatgcaaaacttatgttatatttaggcacaatgataaaacataacatcgaactcttaacttaaccacttgaaatcaaaggtaaat

SEQ ID NO: 1551 - DNA, 2605 bp, Amsonia hubrichtii
accacctcttcatctaccaccgccagcagcggagctgcaccgcttgttccggctatgaaaaaggccaagtctcaggccgtcgcttactctctcgacaacaagaacggccagcctcctcacgtccatttctctcccgatatcgaagccatcgatgggagtaacagtggtaatcctgtctcaatgatcgatatggaggaagaagatcctagtaacttgtctaacgatgccgttatggaccctgggaatgttaataatttcaacggtggtcctgttacccgctcctccggtactgctaatttgtcgaggaagaaggctactcctcctcagcctcagaagaagctcgtcattaagctccttaaaggtaaacctacactgccctcgaattttgaagaaaccacttgggcaacactaaaatctgctatcaatgctatattcttgaagcagccagatccttgtgacctggaaaagctttatcaggcggtaaatgacctttgcctgcataaaatggggggaagcctatatcaacggattgaaaaggagtgtgaggcacatatatctgctgcattgcaatcattagtcggacaaagtgaagatttggtggttttcttgtcacttgtagagaagtgttggcaggatttctgtgaccagatgttgatgattcgtggtatagctttgtatcttgatagaacatatgtgaagcaaactccaaatgtacgttcgctctgggacatgggtttgcagcttttccgaaagcatctttccctagcgtcagaagtggaacacaaaactgtatttggtctcctgaaaatgatcgacagtgaaagattaggtgaagcagttgatagaactcttcttaatcatcttctgaagatgtttactgcattaggaatttatgcagaaagctttgagaagccatttcttgagcgcacgtctgagttttatgctgctgagggtgttaagtacatgcagcagtcagatgttccagattacttacggcatgtggagatgaggttgcatgaagaacatgagagatgcttactctacctggatgccagtaccagaaagccattagttgcgactgcagaaaggcagcttcttgaatggcatatagctgcaattcttgataaaggttttatgatgctgatggatggccatcgtatcgaggatctccagaggatgtatacactcttctccagggtcaatgcccttgaatcattaaggcaggcgcttagctcatacattcggagaactgggcagggcattgtcatggatgatgaaaaagacaaagatatggtttccagtctcttggaattcaaggcatctcttgatacaatatgggaggaaagcttttccaagaatgatgcatttagcaacaccataaaagatgcatttgagcatctgattaatcttcggcagaaccgacctgcggaactaattgccaaatttttggacgagaaacttcgtgctggaaataagggtacatcagaggaggaactggagggtacacttgataaagtcttggttctgttcaggtttatacagggtaaggatgtattcgaagcattctataagaaagatcttgccaaaaggctactgttggggaagagtgcatctattgatgcagagaagtccatgatatccaagctaaagaccgaatgtggcagccagtttactaacaaactcgaaggaatgttcaaggacattgagttatcgaaggaaataaatgaatctttcaagcaatcgtcccaagctcggacaaaacttccttcaggaattgaaatgagtgttcatgtcctgacaacagggtactggccaacatatccacccatggatgttcggcttcctcatgaactcaatgtgtatcaggatattttcaaagaattctatctaagcaagtatcatgggaggagattaatgtggcagaactcattgggtcattgtgtgctcaaagcagagtttccaaaaggtaaaaaggagctggcagtttctctatttcagacggtagttttgatgctgtttaatgatgcacaaaatcttagctttcaagatatacgagaatccactggcattgaagacaaagagcttcgaaggactttacagtcccttgcatgtgggaaagttcgtgttcttcagaagattccaaaaggccgagatgtggaagatgaagattcctttgtgttcaatgatcaattcagtgctcctctttaccgtataaaggtgaatgccatacaaatgaaggaaacagtggaggagaacacaagcacgactgaaagagtattccaggatcggcagtaccaggtggatgctgcaattgttcggataatgaagactaggaaagtgctgagtcacactctactgataactgaactttttcaacagctgaagttccctataaaaccagcagacttgaagaaaaggatagaaagcctgatagacagggagtacctggagcgtgacaagaataatcctcaaatatacaactatttagcatgagcaatcgcaagatgcttcaggtttttggtgtaagtggctctggaaatgcaatgtcttgattaagatgctgcaagttcctaagcccagaatgtgtacagaactacttgtagac

SEQ ID NO: 1552 - DNA, 2615 bp, Helianthus annuus
ccaccaacaccaccggcggcggcggcggaccccacttctccctgatgaagaaggcgaaatctcaagccgtatcttgctctctagacaacaaaaacgggttccaatcacatcaatttgatagtaattcgggtgtgcaagacccctcttcgatgatcgtagatccgactgaaaacgacgccgtacgcgcctcttctgctggtgggtttacggctaatttggctcggaaaaaggctactcctccgcaaccggctaagaagcttgtgattaagctggttaaagctaaaccaaccttgccaacaaactttgaggagaatacatggtcggtcttgaagtcggcaattagcgccatatttttgaagcagccagatccgtgtgatttggagaaactttatcaagcggtcaatgatctttgccttcacaagatggggggaagtctataccaacggattgaaagggaatgtgaatcccacatatcttctgctttacaatcattagtcggtcaaagcgaagatcttgtggttttcttatcacttgtgcacaaaacctggcaagatttctgtgaccaaatgttaatgattcgtggtatcgcgttgtatcttgaccgtacgtatgtcaaacaaactccatctgtacggtcgttgtgggacatgggtcttcaacttttccgaaagcatttatcactagcttcagaagttgaacacaaaacagtctttggccttctgaaaatgatagaaagcgagagattaggcgaagcagttgatagaacacttcttaaccatctgttgaagatgtttaccgctttgggcatttattccgagagtttcgagaaaccattccttgaatgtacatcggagttctatgctgctgaaggagttaaatacatgcaacaatcagatgttccagattatttgaaacatgtggaggtaaggttgcatgaagaacacgacagatgtctactgtatcttgatgctagcacaagaaaaccgttggtggcaaccgctgaaagacaacttcttgagcttcatatatctgcaatactcgataagggttttacgatgttgatggatggcaaccgaacgcaagatcttagaaggatgtacacgcttttcttcagggttaacgcccttgaatctttacgacacgccctaagtgcatacatccgaaaaacaggacagggtattgtaacagatgaagaaaaggacaaagatatggtgtcttccctcttagagtttaaggtttctcttgataaaatatgggaagaaagtttctcgaagaacgatgtgttttgcaacaccattaaagaagcattcgagtatctaatcaatctacgtcagaaccgccctgctgaactgattgcaaagtttttggacgagaaactacgtgctggaaataagggtacatccgaggaagaattggagggcactcttgataaagttttggttttgttcagattcatacagggtaaagatgtgttcgaagcattctacaaaaaggatcttgcaaaaaggcttcttttggggaagagtgcatctattgacgctgaaaagtcgatgatctctaagttgaaaaccgaatgtggtagccagtttaccaacaagctcgaaggaatgtttaaggatattgagttatcgaaggagattaatgaatctttcaagcaatcatcgcaagctaggacgaaactaccctccggaatcgagatgagtgttcatgttttaacaactggttactggccaacatatccaccaatggatgtccgccttccccatgaattgaatgtttatcaggatatatttaaagagttctacttgagcaaatatagcggtaggcgattaatgtggcagaattcattaggtcactgcgtcttgaaagcagaatttgcaaagggaaagaaagaactggctgtttccttatttcagaccgttgttctgatgctgttcaacgatgcacaaaaactaagttttgaagacattaaagatgctactagcattgaggacaaggaactaaggagaactctgcagtcacttgcatgtggaaaagtccgcgttcttcaaaagataccaaaaggtagggaggtggatgataatgatttgttcatgttcaatgatggatttaccgctcccctttatcgtataaaggttaatgctatccagttgaaggaaactgtggaagaaaacgcaagcactactgaaagagtattccaagatcgtcaatatcaggtggatgctgctattgttcggataatgaagactaggaaaatgctgtctcacacacttctgataaccgaactctttcagcagctaaagtttccgataaaaccggttgatttgaagaagaggatagaaagtctaatcgacagggaatacttggagagagacaagagcaacccgcagatatacaactatttagcatgaacatcaatcatgttggattccgagtcgtttacaattatcttgtcagtttatgtaaagaaagtgatgtcatagcttttgttttcactgtaaaaaagcctaaagtgttactttgctttcttgcttcctgttgtagtattcttaaaacaccattactcttttacactacacttgagagcatgtttttcttttccaagcttatgaaaa

SEQ ID NO: 1553 - DNA, 2743 bp, Chenopodium quinoa
ggcaaaatctagagcactctctccctccctctcgactctccccatcatagtcactcctcttccttccatatcccccacctctctctttcttaccaacaccaaataccatgaccctcagctaagacacccccctacccatcttcattctccctcattttcatgtctccccccaacaccaagcgcccttcttccgccgcttccaacaccaactccaacaacctctcttcctccgccttctcttctccgatgaagaagcccaagtcccactctcagcccctcgactccaagaatggcctccaccattccttcaactccgccgccgatgacgataccgatacccccgcttccatgattgttgatgacgatcttaagtctgatgctgctgctgtttctccttcttcgaattctcgtgctccgatcactgctggggttaccgcgaatttgtcccggaagaaggctacccctcctaatccctctactaagaagcttgttatcaagcttgttaaagctaagcccaccctacccccaaacttcgaagaagatacttgggcaaccctgaagtcagccatcaatgctatattcttaaagcagcctgattcgtgtgacctagagaaactttatcaggctgttaatgatctttgcctgcacaagatggggggaagtctttatcaaagaattgagaaggagtgtgaagctcatgtttctgcggtactgcattcattggttggacaaagtccagacctagtagtttttctatcacttgttgagaaatgctggcaggacctttgtgaccaaatgctgatgattcgtggcatagctttgtatcttgataggacatatgtgaaacagaccccaaatgtgaagtcattgtgggacatgggattacagctatttcgtaaacatctttcttcatgtcctgaagttgagcacaaaaccgttactggtcttttgagaatgatcgagagggaaagattaggtgaagctgttgataggactcttctgaaccatcttttgaaaatgtttactgctcttggaatttaccaagagagctttgaaaaaccattccttgcttgcacagaggaattttatgctgctgaaggttcaaaatacatgcagcagtcggatgttccagattatttgaagcatgtcgaaataagattacatgaagaacaagaaagatgtctactttacttggatgcaagtactagaaaaccactcatctcaacggctgaaaagcagcttcttgagcgtcatatatctgcaatacttgataagggcttcatgatgctgatggatggaagtcgtgttgatgatctgcatagaatgtacagtttattttccagggtcgacgcccttgagtctctgagacaggcactaagttcatacatccgcaaagctggtcaggctacagtaatggatgaagagaaagataaagacatggtttcttgcctcttggagttcaaggcagcacttgataaaatatgggaagaaagtttctcaaagaatgaatcatttggaaatactatcaaagattcgtttgagttcctaattaatctacgtcagaaccgtcctgcggagctgattgcgaagtttctggatgagaaacttcgagcgggcaataagggaacatctgaagaggaattggaaggaacccttgataaagttttggttttattccgttttatacagggtaaggatgtttttgaagcattctacaaaaaggatcttgcgaagaggcttttgctaggaaagagtgcttcaattgatgctgaaaagtctatgatctcaaagctcaaaactgagtgcggtagtcaatttactaataaacttgaaggaatgttcaaggacattgaattatcgaaggaaattaatgagtcttttaaacaatcatcccaagcaaggacaaaacttccatcaggaattgagatgagcgtacatgtcttaaccacaggttattggccaacgtaccccccgatggatgtcaggctcccacatgagttaaatgtataccaggacatatttaaagagttttaccttagcaaacacagtggtagacggctaatgtggcaaaattctctgggtcactgtgtcctgaaagcagacttcccaaaaggtaaaaaggagcttgcagtttctctgtttcaggccgtagttttgatgctatttaacgatgctgagagtctgagcttccaagatatgaaggatgccactggaattgaggataaagagctgcggagaactctccagtcccttgcatgtggcaaagttcgtgtccttcagaaggttcctaaaggcagagaagtggaggatgatgactcttttgtgttcaatgacacatttgctgccccgctctatcgtataaaggtcaatgcaatccagatgaaggaaacagtggaggagaacacgagcaccactgagagagtatttcaagatcgtcaatatcaggttgatgctgctatagttcgtattatgaagacgaggaaggtgcttagtcatactcttctgataactgaactattccaacagctcaagtttcccattaaaccagctgatctgaagaaaaggattgagagccttatagacagagaatacttggagagagacaagaataatcctcaaatatataattacttagcgtaaacagatcattttgagtcgaaccttctagatgacagggaaaacctgctactgtcagctgaaggtttgtttgataatgtacagtaatttgcacccttttttttcc

SEQ ID NO: 1554 - DNA, 2562 bp, Ambrosia trifida
ataacaataacaataataataataattctgcttcacaagacccctcttccatgatcgtagatccgactgaaaacgacgccgtacgcgcctcctctcctggtggctttactgccaatttaggtcgcaaaaaagctacccctcctcaacctgctaagaagcttgtgattaagctgcttaaagctaaaccaaccttgccaacaaactttgaggagaatacatgggcagtcttgaagtcggcaatcagctccatattcttgaagcagccagatccttgtgatttagagaagctttatcaggcggtcaatgatctttgcctccacaagatggggggaagtctttaccaacgtattgaaaaagaatgtgaatcccacatatcttctgctttacaatcattagtcggtcaaagtgaagatcttgtggttttcttatcacttgtgcacaaaacttggcaagatttttgtgaccaaatgttaatgattcgtggtatagcgttgtatcttgaccgtacatatgtcaaacaaactccatctgtgcggtcgttgtgggacatgggtcttcaactctttcggaagcatttatcactagcttcagaagttgaacacaaaacagtttttggccttctgaagatgatagaaagcgagagattaggtgaagcagttgatagaacacttcttagccatctgttgaagatgtttactgctttgggcatttatcctgagagttttgagaagccattccttgaatgcacatccgagttttatgctgctgaaggagtgaaatacatgcaacactcagatgttccagattatttgaaacacgtagaggtaaggttgcatgaggagcatgacagatgtctactgtatcttgatgctagcacacgaaaaccgttggtagcaactgctgaaaggcaacttcttgagcttcatataactgcaatacttgacaagggtttcacgatgttgatggatggtaaccgaactcaagatcttagaaggatgtatacgcttttctcgagggttaatgcccttgaatccttaagacatgccttaagttcatacattagaaaaacaggacagggaattgtaacagatgaagaaaaagacaaagatatggtgtactccctcttagagtttaaggcttctcttgataaaatatgggaagaaagtttctcgaagaatgatgttttttgcaacacgattaaagaagcatttgagcatttaattaatctccgtcagaaccgtcctgctgagttgattgcaaagtttttggacgagaaactacgtgctggaaataagggtacatctgaggaagaattggagggcactcttgataaagttttggttttgttcagatttatacagggtaaagatgtgtttgaagcattctataaaaaggatcttgcaaaaaggcttcttttggggaagagtgcatctattgatgctgaaaagtcaatgatctccaagttgaaaaccgaatgtggtagccagtttaccaacaagcttgaaggaatgtttaaggatatagagttatcaaaggagattaatgaatctttcaagcaatcatctcaagctaggacgaaactaccctcaggaattgagatgagtgttcatgttttaacgactggttattggccaacgtatccaccaatggatgtccgccttccccatgaattgaatgtttatcaggacatatttaaagagttctacttgagcaaatatagtggtagacgattaatgtggcaaaattcattaggtcattgtgtcttgaaagcagaatttgcaaagggaaagaaagaactggcggtttccttatttcagaccgttgttctgatgctcttcaacgatgcacaaaagctaagttttgaagatattaaagatgctactagcattgaggacaaggaactaaggagaactctgcagtcacttgcttgtggaaaagtccgtgttcttcaaaagataccaaaaggtagggaagtggatgataatgattcttttatgttcaatgatggatttactgctcccctttatcgtataaaggttaatgctatccagttgaaggaaacggtggaagaaaatgcaagcactactgaaagagtattccaagatcgtcaatatcaggtggatgctgctattgttcggattatgaagactaggaaaatgctgtctcacacacttctgataactgaactctttcagcagcttaagtttcctataaaaccagttgacttgaagaagaggatagaaagcctaatcgacagggaatacttggagagagataagagcaatcctcagatatacaactatttagcatgaacatcatcaattaaagatgcagtctggatcttttacaatttccttgccagtttatgtaaagaaagtgatgccatagcttttgttttcattgtaaaaaagcctaacttgttactttgctttcttgcttcctgttgtagtattcttaaacaccattactctactacactacacttgaaagcatgtttttttccaaacatataaaaacttaacgttctgatctgtttggtttaaaaaaaaagtaaacgaaacc

SEQ ID NO: 1555 - DNA, 2648 bp, Brassica rapa
gggacatgtatcctccttcttcttttccttgttctctcccgatatttcatgtctcttccaaccaaacgctctacttgcccctcctcctcctcctcctcctcttccccgcccatgaagaaagccaaaaacggcctccaccctccttccgccgacaaggttggctttcccatggaggaggaggatgaagatcctactccctccgccgccaatctctcccgcaagaaagctactctcccccagccttccaaaaagctcgtcatcaagctcaacaaagctaaaccaagtctacctacaaactttgaagacactacctgggataatctccagtcagctatcagagctatattcctcaaacagcccttttcttttgacctcgagcggctttaccaggctgttgataacctttgcttgcataagctggaaggaaagctttaccaacggattcagaaggagtgcgaagaacacatctctgcagctttacagtcgttagttgggcaagacaccgatctgtctgttttcttgtcactcgttgagaattgctggcaggatttctgtgaccagatgctgatgatccgtagtatagccttgtctttggataggaagtatgtcatacagaacccaaatatacgttcattgtgggagatgggcctgcagcttttccggaagcatctttctctgtcccctgatgttgagcagaggactgttactgctctcttgagaatgattgaaaaggaaaggttagccgaagctgttaataggactttactaagccatctcttaaagatgtttactgcactgggaatatatacggagagctttgagaaacatttccttgaatgcacttctgaattttatgctgctgaaggaatgaagtatatgcagcagtatgacgttcctgagtacctgaagcatgtcgagggaaggttgcatgaagagaatgaaagatgcatactatacatagatccatcgaccaggaaaccgttgatatcaactattgaaaagcaactccttgagcgtcatacagttgcgatccttgataagggtttcacaccattaatggatggacgtcgtactgaggacctccagaggatgtacaccctgttttctagggtcaatgcacttgagtctttgaggcaggcgcttagttcctacattcggaaaactggacagaagattgttatggatgaagaaaaagataaagatatggtacaatcactattggacttcaaggcttctcttgacatagtatgggaagagagcttttgcaagaatgaatcatttggcaacacaatcaaagattcgtttgagcatctgataaatcttcgccagaatcgtccagctgaacttatcgccaaatttttggacgagaagctccgtgctgggaataagggtacttctgaagaagaattggagagcacccttgaaaaagtcttggttttgttcagatttatccagggtaaagatgtgttcgaagcattctataaaaaggatcttgcaaagagactccttttgggaaagagcgcatcgattgatgctgagaagtccatgatctctaagctcaagactgagtgcggtagccagtttacaaacaagctcgaagggatgtttaaggatattgaattgtcaaaggaaatcaatgagtcattcaaacaatcgtctcaggccagaacaaaactgccatcgggaattgagatgagtgtccacgttttaaccacagggtactggccaacatatccccctatggatgtcaaacttcctcatgaattaaatgtctatcaggatatcttcaaagagttctatttgagcaagtacagtggcaggaggttaatgtggcaaaattcactaggtcactgtgttctgaaggcagatttcaccaaagctaaaaaggagcttgctgtttccctttttcaggctgttgttttgatgttatttaacgatgcaatgaaacttagctttgaagacattaaagattccactggcatagaggacaaagaactgagaaggactctacagtcgcttgcctgtggaaaagttcgtatcctgcataagtatccaaagggaagagacgttcaagacggggatgaatttgattttaatgacacctttacagctcctctctatcgcattaaggtgaatgcaatccagatgaaagagactgtagaagagaacacgagtacaacagagagagtattccaggacagacaataccagattgatgcagccattgttcgaattatgaagacaagaaaagtcttaagccacactctcttaatcactgagctcttccaacagctgaaattcccaataaaaccggctgatctgaagaagaggatcgaaagcctgatcgatcgagagtacttggagagggacaagagcaaccctcagatatataattatcttgcttagtaatctcacctctctgctaaacgtcttttcaacattttattttattttattttatttcttactctgtatatttcttcaatctaaaaaaaaaagaactcgagatttcggttctttcttgccttttccgattttattcagcttgtatttcttcctaattttttccctttccttcgctgctagtataaatgagtgaataagaacatcttcatctttagtataagaaagactgaaagaggttctca

SEQ ID NO: 1556 - DNA, 2543 bp, Solanum phureja
cacaagatttcactctttttctctttgtcttctttatttatgtctcaacccaacaagcgatcttcttccctcagtacaccaccaccatctccactttcccgttcaatgaagaaggccaagtctcaggccgcagctactgatgacaacaagaatggccagcagcagcaccacaaagtcgaatccacagacgaaccttgtgtgtccatgatccaatattcgggtggtggagtcacttccaatttgtctcgaaagaaagctacccctccccctaagaagcagctagtcattaagcttaacaaagcaaaacctacactcccaacaaattttgaagaaaatacttgggcaactctgaagtcagctatcagtgcaatattcttaaagcagcctgatccttgtgacttggaaaagctttatcaggctgtcaatgacctgtgtctgcacaagatgggtggaagtttataccaacggattgaaaaagagtgtgaggcacacatagttgcagtattgcagtccttagttggccaaagtgaagatcttgttgtttttctatcacttgttgagaggtgctggcaggacttctgtgatcagatgttgatgatccgtggtatagcgttgtttctagatagaacatatgtgaaacaaaccccaaatgggcattcattgtgggatatgggtttgcagctttttcgcaaacatctttgtctagcttcagaagtagaacacaaaattgtctttgggctccttcagatgattgagagtgaaagattaggtgaggcagttgatagaactcttcttaaccatcttttgaagatgttcactgccttaggaatttacgcagagagctttgagaagccatttgttgagcgcacttctgagttttatgctgctgaaggtgtcaaatacatgcaacagtcagatgttccagattacttgaagcatgtagaggtaaggttgcatgaagaacatgataggtgtttacactacctggatgcaagtacaagaaaaccactaatagcaactacagagaggcaacttttagaacgtcatatttctgcaatacttgacaagggtttcatgatgctgatggacggaaagcgtattgaggatcttcgaagaatgtattcactattccctagggtagaggcgcttgaatcattgaagcaaactcttagcttgtacatccgaaaaaatgggaaaagcattgtgcatgacgatgaaaaagataaagatatggtatctagcctgttagagtttaaggcatccgttgatactatatgggaagaaagtttttctaaaaatgaagcatttggcaacactatcaaggatgcgtttggacatctcataaatgtctgtgagaatcggcctgccgagctgattgctaaatttctggacgagaagcttcgtgctggaaataagggtacttcggaagaggaattggagggtatacttgataaagtcttggttctgttcaggtttatacagggtaaggatgtatttgaggcattctacaagaaagatctagcaaagagattattgttgggaaagagcgcctcaatagatgcagagaagtccatgatctctaagttgaagactgaatgtggtagtcaattcactaacaaattggaaggaatgttcaaggatattgaattgtcaaaagagataaatgaatcctttaagcaatcttctcaagccaggaaaaaactcccaacaggaattgagatgagtgttcatgtattaaccacagggtactggccaacatatccgcccatggatgttcggctcccccatgaactcaatatctatcaggatattttcaaggaattctacttgagcaaatacagcggtaggcggttgatgtggcaaaattctttgggacactgtgttctaaaagcagagtttcccaaaggcaaaaaggagctggcagtgtctctgtttcaggctgttgttttaatgctttttaatgatgcggaaaagcttagctttcttgatatgagggaagcaactcgaattgaggataaagagctcaggagaactttacagtctcttgcatgtggtaaagttcgtgttctccagaagattccaaaaggaagagatgtggaagacgacgatacctttgtgttcaatgatcaatttactactccactctatcggataaaggtaaatgccattcagatgaaggaaacagttgaggagaacacaaacaccacagaaagagtattccaggaccggcaataccaggttgatgctgctatcgttaggataatgaagaccagaaaagtgctgagtcatacccttttgataactgaactctttcagcagcttaaatttcctgtaaaaccagctgacttgaagaaaaggattgaaagtctcatagaaagggagtatctggaacgagacaagaacaatcctcaagtttacaactatcttgcctagaatgttcatggcataaattttttcttgtaaatgactcgagatgacttccattctcagattcaactgtaaagttagcctttatttcatatagatatatgtactcttttgaa

SEQ ID NO: 1557 - DNA, 2578 bp, Vaccinium corymbosum
acgctcgacacagagtggctattaacggccggggtctccgtctctcttgaagctgctcctgttctgagaattccacttggtcgtatttttgggttctcttcttcccgtaatgagtagttgttgatcattttctgctgtatgtctcatcccaatcctaacaattctaccaacaatcacagcaacaagcgcagctcggcttctcataatttcccggcgatgaaaaaggccaagtcccaagccgtcgcttcttctctcgacaacaaaaacggcctccaccaccaaccaccaccccatcaccacatccacttcgacaccgatctcgcttcgatcgaagaagatcccaacagcaaccaccccatcccggttggctccagcggcgtcacctccaatttgtctcgaaagaaggccacgcctccccaacccgccaagaagctcgttattaagctcctcaaagctaaacccactctgccaacaaattttgaggaaaatacatgggcaacattgaaatccgctataagtgccatattcttgaagcagccagactccttgtgacttggagaagctttatcaggctgtcaatgacctttgcctgcacaagatggggggaagtctttatcaacgaattgaaaaagaatgcgaggcacatatatctgctgcactacaatccttagtgggccaaagcgaagatctggttgttttcttatcacttgttgagaaatgctggcaggacttctgtgaccagatgttgatgattcgtggtattgccttgtatctcgatagaacgtacgtgaaacaagctccgagcacgcgctccttgtgggacatgggcttgcagctttttcgcaaacatcttgctctagcaggagaagttgagcacaaaactgtatttggccttctaaaaatgattgagagtgaaagattaggtgaagcagttgatagaactctccttaaccatctattgaagatgttcactgctttaggaatttattctgagagctttgaaaagccattccttgagcggacatctgaattttatgctgctgaaggtgtcaaatacatgcagcaatctgatgtccctgactacttgaagcatgtggagataaggttgcatgaagaacatgaaagatgtgtgctctacctggatgccaatacaagaaagccgctggtagcaactgcagaaaggcaactccttgaacgccacatttctgcaattcttgataagggttttgttatgctgatggacgggaatcgtattgaagatattcagagggtgtacttacttttctctcgagtcaatgccgttgaatcgttgaggcaggcccttaactcttatatccggaaaactgggcagggcattgtcatggatgaagagaaagacaaagatatggtatcttgcctcttggaatttaaggcttctcttgataccatatgggaagaaagttttgctaagaatgaagcattttgcaacactattaaagatgcatttgagcatctggttaatttcagacagaaccggcctgctgaattaattgcgaagtttttggacgagaggcttcgtgctggtaataaaggtacatctgaagaggaattggagggtacacttgataaagtcttggttctgttcaggtttatacagggtaaggatgtgtttgaagcattctataagaaggatcttgcgaaaagactactcttgggaaagactgcttccattgatgccgagaagtccatgatttcgaagttgaaaactgagtgtggtagccaatttaccaacaaacttgaaggaatgttcaaggacattgaattgtcgaaagagataaatgagtccttcaagcaatcatcccaggccaggacaaagctcccatcagggattgagatgagtgtacatgttttgacaacagggtattggccaacgtatccaccaatggatgttcggcttccgcacgaactcaacgtgtatcaggacatttttaaggagttctatttgagcaagtatagtgggaggcgattaatgtggcaaaattcattaggacactgcgtgttaaaagcagaattcccaaaaggtaaaaggagctggcggtttcgctgtttcagactgttgttttgatgctgtttaacgatgcccaaaagctcagctttcaagatattaaggattcaacaagcatcgaggataaggagttgagaaggactctgcagtcccttgcatgcggtaaagttcgtgtgcttcagaagttgtccaaagggagagaagttgaggatgatgattcattcgagttcaatgaaggatttactggtcctctctaccgtataaaggtaaatgctatacagatgaaagaaacagtcgaagagaacacaagcacaactgaaagagtgttccaggaccgtcaatatcaggttgatgctgccattgttcggataatgaagacaaggaaagttctaagtcacacgcttttgatcactgaactattccagcagctcaagtttccgataaagccagctgacttgaagaaaaggatcgagagccttattgatcgggagtacctagagcgggacaagaataaccctcagatatacaactacc

SEQ ID NO: 1558 - DNA, 3011 bp, Beta vulgaris
aattattcatgataatttagaacaagctctacaagagtgagtgtgtgaaaattgaaaacccataagagtctagagcactctccagtctccactcccccatctatcaactcacaactctcccatatctcgatcaaaaccaatttcaccaatacaacaataccatgagcctccttagctaatagaaagagagctccatccccaattccccactcaaactcccctcatttcatgtctccacccaacaacaacaagcgcccagcctcatctcccaccagtacccacactaacctcacctcctcttccttctctccgtcaatgaagaagcccaagtctcagtctcttgataccagaaatgcccttcactccgcctttaactcctcttccgccgttgacgacgaccccgcttccgtgatcgtcgacaacgatgacgatctcaaatctaacgctgtaatctcttcttcagctaactctcgttccgctccgatttcgggcggtgttactgctaatttatcccgtaagaaggccacacctcctaatccctctaccaagaagcttgttatcaagcttgttaaagctaagccgacactacctcctaattttgaggaagttacttgggcaaccttgaagtcagccataaatgctatttttttgaagcagcctgattcatgtgatctggagaaactctatcaggctgttaatgatctttgcctgcacaagatggggggaagtctttatcaacggattgagaaggagagtgaagctcatgtgtctacagtactgcattcattggttggccaaagtccagatctagtggtttttctgtcacttgttgagaaatgctggcaggatctctgtgaccaaatgctaatgatccgtggcatagctttgtatcttgataggacgtatgtgaaacagaccccgaatgtgaagtcattgtgggacatgggattgcagctttttcggaagcacctttctttgtgtcgtgaagttgaacacaaaactgttactggtcttttgagaatgatcgagagagaaagactaggtgaagctgttgataggactcttctcaaccatcttttaaaaatgtttactgctctgggcatttaccaagagagctttgaaaaaccgttccttgattgtacagaggaattttatgctgctgaaggtgcaaaatacatgcagcagtctgatgttccagattacttgaagcatgttgaaataagattgcatgaagaacaagaaagatgccttctttacttggatgcaagtactagaaagccactcatctcaacagccgaaaagcagcttcttgaacgtcatatttctgcaatacttgataagggcttcatgatgcttatggaaggaagtcgtgttgatgacctccagaggatgtacaatttgtttctcagggtcaatgccctcgagtctctgaggcaggcactaagttcgtacatcaggaaagctggtcaggctacagttatggatgaagagaaagataaggatatggtgtcttgtctcttggagttcaaggcagctcttgataaaatatgggaagaaagtttttcaaagaatgaatcttttggcaatacaatcaaagattcatttgaatacctcattaatcttcgtcagaaccgtcctgccgagctgattgcaaagtttctggatgagaagcttcgagctggaaataagggaacatctgaggaggaattggagggcacccttgataaagttttggtgttattccgatttatacagggcaaggatgtctttgaagcattctacaagaaggatcttgcaaagaggcttttgttgggaaagagtgcttcaattgatgccgagaagtctatgatctcaaagctcaaaactgagtgtggtagtcaatttacaaataaactcgaaggaatgttcaaggatatagaattgtcgaaagaaattaatgagtcttttaaacaatcatctcaagctaggacaaaacttccatcaggaattgagatgagtgtccatgtcttgactactgggtactggcccacgtaccctcctatggatgttcggctcccacatgagttaaatgtataccaggacatatttaaagagttttaccttagcaaatacagtggtagacggctaatgtggcagaactcgttaggtcactgtgttctgaaagcagatttccccaaaggtaaaaaggagcttgcagtttccctctttcaggctgttgttttgatgctatttaatgatgctgagaagctaagctttcaagatattaaggatgccactggaattgaagataaagagctccgaagaaccctccagtcccttgcgtgtggcaaagttcgtgtccttcagaaggttcctaaaggaagagaagtggaggatgatgactcttttgtgttcaatgatacattttctgccccgctttatcgtataaaggttaatgctatccaaatgaaagaaacggtagaggagaacacaagcaccactgagagagtatttcaggatcgtcaatatcaggttgatgctgctatagttcgtatcatgaaaacaaggaaggtgcttagtcatactctcctgataactgaactcttccagcagctcaagtttcccataaaaccagctgacctgaagaagaggattgagagccttatagacagagaatacttggagagagacaagaataatcctcaaatctataattacttggcgtaaacacatcatttgaagtagaaccttctagatgactcggggaaaccctggtactgtcaactgaaggttggttgtctgataatgtacagtaacttgcatccttcactttctttttcatttccaaccatttagatgtaattttccccccatatcttgatatttatgctttacaatctttcagaaaattcttcatatcaagagcaaaagtatattgtaaaatatcagctatgtggtaattagtactaagttgcctctggtcgctcgaatctcttattttgccatgtattctctcacaaaattgacctagc

SEQ ID NO: 1559 - DNA, 2998 bp, Aristolochia fimbriata
aggaccgaaataatccaagtagaaagtagaaactaagaagtacaaaggcgaacgacgttcctgtatctgtctctggatcgtccctttggtagtcgcatcatcggttttcagtaattcaactgtctcggatcctcgcccgtgttcctctctcgactggaattcatccttgcgaggattgatattgtcgagagacataaaaattccagccctgccgcaacgaatttgtacgatgcgcttagagtgattggatgtctcactcaaagcgtccgcactataacagcggtagcagcagtagcagcggcggtccttctctatcgagcatgaagaaagccaagtcgcaaccacagtcaggacctttctccctcgaaaagaacggtattcagccgcagcagtccccattcaacgaagacgacgacgaggattcgatgctcgtcgatgaagatgtcaaagcagtcgctcccaacgtccttggcatcgggtgctctggtagtactaccggggtggcagctaatttatcgaggaaaaaggccacgccgcctcagcccgcaaagaagctcgttatcaagttcactaaagataagcctaagctaccaacaaattttgaagaggatacatgggcaacattaaagtcagctattggtgccatattcttgaagcaacctgatccttgtgattctgagaaactttatcaggctgttagtgatctttgtttgcacaagatgggaggtaatctgtatcaacgaatccagaaagaatgtgaagcacacatatctacgactctgcaatcattggtcggtcaaagcccagatttggtggtatttctatccttggttgagaaatgttggcaagatctttgtgaccaaatgttgatgattcgtggtatagccttatacctagacagaacctatgtcaaacaaaatccaaatgttcgttcattatgggacatggggttgcagctgtttcgtaaacatctttccttatctccagaagttgaacacaaaactgtcactggtcttttaagactgatagaaagagaaaggttgggtgaaacaattgacaggtcacttctaaatcatcttctaaagatgttcactgccctagggatctacacagaaagctttgagaagccgtttcttgagtgcacatctgagttttatgctgctgagggtgtgaagcgcatgcagcaagacaatgttaccgcgtacttacagcatgtagagttaaggttgcatgaagaacatgaaagatgtttactgtaccttgatgccagtacaaagaaacctttggtagctacggcagaaagacaacttcttgatcgtcatacatctgcaattcttgataagggattcacaacgcttatggatacaaatcgtattgaggaccttcacagaatgtatggattattttcaagagtaaatgcccttgaatcacttcgacaagccttgagctcatacatccgtgggactggtcaggggatcatcatggatgaggagaaagacaaagatttggtgtcttgtctcctagagttcaaggcatcccttgacaccatatgggaactcagcttttccaaaaatgaggccttttctaacaccataaaggatgccttcgaacatctcattaatcttcgtcagaaccggccggctgagctgattgctaagtatttggatgagaaacttcgtgctggtaacaagggcggttctgaagaggagttggagagcactcttgataaagttttggttttgtttcgatttatacagggtaaagatgtctttgaagcattctacaagaaagatcttgcaaagaggttacttctgggtaaaagtgcctcgattgatgctgagaagtcaatgatctcaaagctcaaaactgaatgtggtagccagtttaccaataaacttgagggaatgttcaaggatatagagttatcaaaggaaataaatgagtcctttaaacagtcatcccaagccaggacaaaactaccaacagggattgagatgagtgtccatgtcttgacaactgggtactggccaacataccctccgatggatgttcgtcttcctcatgaactgaatgtctatcaggacattttcaaagagttctatttaagcaagtatagtgggaggcgtctgatgtggcaaaattcattgggtcattgtgtattaaaagcagagtttccaaaagggaaaaaagaattggcagtttctctctttcagactgtcgtcttgatgctgttcaatgatacacaaaggcttatttttcaagatatcaaggaatctactggtatagaagataaagaattaaggaggactttgcagtcacttgcttgtggaaaggtccgcgtgttacagaagcttcctaaaggcagagaagttgaggatagtgacttgtttgttttcaatgaagaatttagtgcacctctttatcgtataaaggtgaatgcaattcagatgaaggaaactgttgaagagaatactagcaccacagaaagagtgttccaagatcgtcagtatcaggtggatgcagcaattgttcgtattatgaagaccaggaaagtactaagccacaccttattgataaccgaacttttccagcagctcaaatttccaataaaaccggcggacttgaagaaaaggatcgagagcctcattgacagggagtatttggagcgagacaagaacaacccacaaatatacaattaccttgcttaggtcaacaaagaatacgtttatgaactagacatcgttctgtaaatgatacaggagcagaagccttcccacaagtaatgtgcattgcctgaaggctgttgtttcttttccgcgacagtgtacagctacttgattttacttatttggccactcgctgtgtccatcatcttttgctttcttttgtcttattcattttgcctgtttagtttttatttttatttttatttttatttttgggatttaatgcaaaccaacatgatgcttgataagacaaagtcacgtggttaaccgag

SEQ ID NO: 1560 - DNA, 2516 bp, Flaveria ramosissima
cactttcatatgtcgcaaccctcaacaacaaccgcaacactcatctacaacctgcacatctccaccttcacaatccacccacacaaccaccggcggcggcggacctcactttccggcgatgaagaaggcgaaatcgcaggctgtatcttgctctttggacaacaaaaacgggtttcaatcgcatcaatttgatagtaattcgtcggtgcaagacccttcgtccatgatcgtagatccgactgataacgatggtggaagagcctcttctgctggtggattcaccgctaatttggctcgtaagaaagctacgcctccgcagcctgctaagaagctcgtaatcaaacttgttaaagctaaaccaaccttgcctacaaacttcgaggagaatacatgggccgtcttgaagtcggcaattaatgccatattcttgaagcagccagattcttgtgatttggagaagctttatcaagcggtcaatgacctttgccttcacaaaatgggaggaagtctttatcaacggattgaaagagaatgtgaatcccacatatcttctgctttacaatcattagttggtcaaagtgaagatcttgtggttttcttatcacttgtgcacaaaacctggcaagatttctgtgaccaaatgttaatgattcggggtatagctttgtatcttgaccgtacatatgtcaaacaaactccatctgtgcgatcattgtgggacatgggccttcaactctttcggaagcatctatcactagcttctagaagttagaacacaaaacagtctttggccttctgaaatagatagaaagtgagagattaggtgaagcagttgatagaacacttcttaaccatctgttgaagatgtttactgctctgggcatttattctgagagttttgagaagccattccttgaatgtacattagagttttatgctgctgaaggagtaaagtacatgcaaaattcagatgttccagattatttgaaacatgtggaggtaaggctgcatgaagaacatgacagatgtctgctgtatctggatgctagtacgagaaaaccgttggtagcaactgctgaaaggcaacttcttgagcttcatatatctgcaatacttgataagggtttcacaatgttgatggatggtaaccgaactcaagatcttagaaggatgtattcacttttctccagggttaatgcccttgaatctttaagagttgccctaagttcatacatcagaaaaacagggcaaggaattgtaacagatgaagaaaaggacaaagatatggtgtcttccctcttagagtttaaggcttctcttgataaaatatgggaagaaagttttcaaagaatgatgttttttgtcaataccattaaagaagcatttgagcatctaattaatctccgtcagaaccgtcctgctgaattgattgcaaagtttttagatgagaaacttcgtgctggaaataagggtacatcagaggaagaattggagggcactcttgataaagtattggttctgttcagatttatacagggtaaagatgtgttcgaagcattctacaaaaaggatcttgcaaaaagacttcttttagggaagagtgcatctattgatgctgaaaagtcaatgatctccaagttgaaaaccgaatgtggtagccagtttaccaacaagcttgaaggaatgtttaaggatatagagttatcaaaagagataaatgaatctttcaagcaatcatctcaagctaggatgaaactaccctcaggaatcgagatgagtgttcatgttttaacaactggttactggccaacatatccaccaatggatgttcgccttccccatgaattgaatgtttatcaggacatttttaaagagttctacttgagcaaatatagcggtaggcgattaatgtggcaaaattcattaggtcattgtgtcttgaaagcagaatttgcaaagggaaaaaaagaactggcagtttccttatttcagactgttgtcctgatgttgttcaacgatgcacaaaagcttagttttgaagatattaaagatgctactggcattgaggacaaggaactaaggagaactctgcaatcacttgcttgtggaaaagtccgcgtcctacaaaagataccgaaaggcagggaagtggaagataatgattcattcatgttcaatgacacgtttaccgctcctctttatcgtataaaggttaatgccatccaattgaaggaaactgtggaagaaaatgcaagcactacagagagagtattccaagaccgtcaatatcaggttgatgctgctattgttcggataatgaaaactagaaaaattctgagtcacacgcttctgataaccgaactcttccagcagctcaagtttcctataagccagttgacttaaagaagaggattgaagcctaatcgacagagagtatttggagagagataagaacaaccctcacgatatacaattacttggcataacatcaagtcaacttgcatttatgtaattag

SEQ ID NO: 1561 - DNA, 2578 bp, Chrysanthemum coronarium
ccgccgcctccgcctccgtaacgccaccgtcgtcaatcatgaaaaaagctaaatcacaagtcggctcatcgtcttcttcttcctcacactcgttcgataacaaaaacggattccagtatcagattgagaataatactaatagtggtgacgctatggttgaagatccggttgagatgacgtcatctggatatgcggctaatttggctaggaagaaggctactgtgccggttcctaataagaagcttgttattaagcttaaaggcaagccggccatgccgacaaacttggaggaggatagatggacagtcttgaagtctgcgattagtgccatatttttgaagcagccaggatcttgtgacttggagaaactttatcaagccgtcaatgatctttgcctctggaagatgggaggaagtctttaccaacggattgagagggagtgtgaagcccacatatctgctgctttacaatcattggttggtcaaagtgaagatcttgtggttttcttatcacttgttcagaaaacctggcaagatttttgtgatcaaatgttgatgatacgtagtatagcgttgtttcttgaccggacgtatgtgaaacaatcaccaaatgtgaaatcgttatgggacatgggccttcaactttttcgtaagcatttgtcattagcttcagaagttgagcacaagacagtatttggccttctgaaaatgatagagagtgagagattaggtgaagcagttgatagaacacttcttagccatctcttgaagatgttcactgccttgggcatctactctgagagttttgagaagccattccttgaatgtacgtcagagttctatgccgctgaaggagtacgatacatgcaaaactcagatgttccagattatttgaaacatgtcgaggtaaggctacatgaagagcacgatagatgtctactttatcttgatgatcatacaagaaaacctttagtagcaactgctgaaaggcaactccttgagctccatatttccgctatacttgataagggtttcacaatgttgatggatggtaatcgaactcaagatcttaaacggatgtatacacttttctctagagtaggtgccttagaatccttacggcaggcccttagctcatacatccgaaaaacggggcagagcatagtaacagatgaagagaaggaaaaagatatggtgtcctcgctcttagagttcaaggtgtctcttgataaaatatgggaagatagcttctcgaagaatgatgtttttagcaatacaataaaagaggcatttgagcatctaattaatctccgccagaaccgccctgctgagttgatcgcaaaatttttggatgagaaacttcgtgctgggaataagggtacatcagaggaagaattggagggaactcttgataaagtcttggtgttgttcagatttatacagggtaaggatgtgtttgaagcattctataaaaaggatcttgcaaaaaggcttcttttgggaaagagtgcatctattgatgctgaaaagtccatgatctctaagttgaaaaccgaatgtggtagccagttcaccaacaaacttgaaggaatgttcaaggacatagagctatccaaggagataaatgagtctttcaggcaatcatctcaagctaggacaaagctcccttcaggaatcgagctgagtgtccacgtcttaacaactgggtactggccaacctatccaccaatggatgtccgccttccccatgaactgaatgtttatcaggacatttttaaagagttctacttgagcaaatacagtggtaggcgactaatgtggcaaaattcattaggtcactgtgtcttgaaagcagaatttccgaaaggcaaaaaggaactggcagtatccttatttcagactgttgttctgatgctgttcaacgatgcacaaaaacttagtcttcaagatattagggatgctacaagcatcgaggacaaggaactgaggagaactttgcagtctcttgcttgtggaaaagtccgtgtccttcaaaagattccgaaaggcagggaagtggatgataatgattcttttgagttcaatgatgcattcacggctcctctttatcgtataaaggttaatgctatccagttaaaagaaactgtggaagaaaatgcaagcactaccgagagagtattccaagatcgtcagtatcaggttgatgctgctattgtccggattatgaaaactaggaaaactttgagtcacacacttctgataaccgaactctttcagcagctcaagtttccgataaaaccagttgacttgaagaagaggattgaaagcctgattgatagggaatacttggagagagacaagagcaatcctcagatctacaactacctagcgtaaacatcaactccaacaagtctacttgtacacggcatcgggattggatctttcacagtttccttgtctgtttatgtaaagtgatagcttttgttttcattgtaaagcctaattgtttaagcttctattgtagtattgttaaattaaatacttttattactcttacgtacacgactattgagagcaag

SEQ ID NO: 1562 - DNA, 2848 bp, Brassica rapa
gagagcgcacacacagtgtgttaatttcttttttttcattgaaagggttaatagggacatcttcttcttgatttcactcacctctcccttaacttttcatgtctcttccaaccaaacgctctacttgctccgccgcttctaccgactcttctctctcttccccgcccatgaagaagtccaaaaacggcctccacgcctccgacaaggttggcttctccatggatgaagatccagctccctcctccgccgctaatctctctcgcaagaaggccactctccctcaccccactaagaagctcgtcatcaagctcaataaagcgaaaccaagtctacctacaaactttgaagatactacctgggaaaatctccagtcagctatcagagctatattccttaaacagccctttccttttgacctcgagaggctttaccaggctgttgatgacctttgcttgcataagctggaagggaagctttacgaacggattgagaaggagtgtgaagaacacatctcttcagctttacaatctttagttggccaagacactgatctctctgttttcttgtcgctcgttgagaaatgctggcaagatttctgtgaccagatgttgatgattcgtagtatagccttgtctctggataggaagtatgtgatacagcacacaaatgtacgttcgttgtgggagatgggcctgcagctttttcggaaacatctttctctgtcccctgatgttgagcagaggacagttactgctctcttgagaatgattgaaagggaaaggttggccgaagctgttaataggacactactaagccatctcttaaagatgtttactgcactgggaatatatgcggaaagctttgagaagcagttccttgaatgcacttctgagttttatgctgctgaaggaatgaaatacatgcagcagtatgacgttcccgagtacctgaagcatgtcgagggaaggttgcatgaagagaacgaaagatgcatactgtatatagatgcatcaaccaggaaaccattgatatcagctgttgaaaagcaacttctcgagcgtcatatacatgctgtccttgataagggttacacaccgttgatggatgggcgtcgtaccgaggacctccagaggatgtacaccctgttttctagagtcagtgcacttgagtctctgaggcaggccctaagttcctacattcggaaaactgggcagaagattgttatggatgaagagaaagataaagacatggtacaatcactattggacttcaaggcttctcttgacatagtatgggaagagagtttttgcaagaatgaatcatttggcaacaccattaaagattcgtttgagcatctgataaatcttcgccagaatcgtccagctgaacttattgccaaatttttggacgagaagctccgtgctgggaataagggtacttctgaagaagaattggagagtacccttgaaaaagtcttggttttgttcagatttattcagggtaaagatgtgttcgaagcattttataaaaaggatcttgcaaagagacttctgttgggaaagagcgcttcaattgatgctgagaaatcaatgatctctaagcttaagactgagtgtggtagccagtttacaaacaagctcgaaggaatgttcaaggatattgaattgtcaaaggaaatcaacgagtcattcaaacagtcgtctcaggccaggacaaaactgccatcaggaattgagatgagtgttcacgttttaacaacagggtactggccaacatatccacatatggatgtcaaacttcctcatgaattaaatgtctatcaggatatcttcaaagagttttatttgagcaagtacagtggaaggaggttaatgtggcaaaattcattaggtcactgtgttttgaaggcaggtttctccaaaggtaaaaaggagcttgctgtttccctgtttcaggctgttgtgttgatgttattcaacgatgcaatgaaacttagctttgaagacattaaagattccactggcatagaggacaaggaactgagaaggactctgcagtcgcttgcttgtgggaaagttcgtgtcctgcaaaagtatccaaagggaagagacgtacaagacagggatgaatttgattttaatgatacctttacagctcctctgtatcgcattaaggtgaatgcaatccagatgaaagagacagtagaagagaacacgagtacaacagagagagtattccaggaccgacaataccagattgatgcagccattgttcgaattatgaagacgagaaaagtcttgagccatactcttctaatcactgagctcttccagcagctaaagttcccaataaaaccggctgatctgaagaagaggatcgaaagcctgatcgatcgagagtacttggagagggacaagagcaaccctcagatatataattatcttgcttagtaatctcacctctctgctaaacgtcttttcaacattttattttattttattttatttcttactctgtatatttcttcaatctaaaaaaaaaagaactcgagatttcggttctttcttgccttttccgattttattcagcttgtatttcttcctaattttttccctttcaattatcttgcttagaatctctctgttgaacgccttttacaatgtttttgtttcttctctgtatatttattcacaaacaatggccgacattgcattacagcttagttcggagtttccgacataacaatgataagtttctaaacagtaaacatcacataactgaatgagaagagacaatcagatacttaatcgagttaagtccaatgtctctacatgtgactttggctcgg

SEQ ID NO: 1563 - DNA, 2586 bp, Brassica napus
ggatgtctcttccaaccaaacgctctacttgcccctcctcctcttccccgccgatgaagaaagccaaaaacggcctccacactccttccgccgacaaggttggctttcccatggaggaggaggatgaagatcctactccctccgccgccaatctctcccgcaagaaagctactctcccccagccttccaaaaagctcgtcatcaagctcaacaaagctaaaccaagtctacctacaaactttgaagacactacctgggataatctccagtcagctatcagagctatattcctcaaacacccctttccttttgacctcgagcggctttaccaggctgttgataacctttgcttgcataagctggaaggaaagctttacaaacggattgagaaggagtgcgaagaacacatctctgtagctttacagtcgttagttgggcaagacaccgatctgtctgttttcttgtcactcgttgagaaatgctggcaagatttctgtgaccagatgctgatgattcgtagtatagccttgtctttggataggaagtatgtgatacagaacccaaatatacgttcattgtgggagatgggcctgcagctttttcggaagcatctttctctgtcccctgatgttgagcagaggactgttactgctctcttaagaatgattgaaaaggaaaggttagccgaagctgttaataggactttactaagccatctcttaaagatgtttactgcactgggaatatatacggagagctttgagaaacatttccttgaatgcacttctgaattttatgctgctgaaggaatgaagtatatgcagcagtatgacgttcctgagtacctgaagcatgtcgagggaaggttgcatgaagagaatgaaagatgcatactatacatagatccatcgaccaggaaacccttgatatcaactattgaaaatcaactccttgagcgtcatacagttgcgatccttgataagggtttcacaccattaatggatggacgtcgtactgaggacctccagaggatgtacaccctgttttctagggtcaatgcacttgagtctttgaggcaggcgcttagttcctacattcggaaaactggacagaagattgttatggatgaagaaaaagataaagatatggtacaatcactattggacttcaaggcttctcttgacatagtatgggaagagagcttttgcaagaatgaatcatttggcaacacaatcaaagattcgtttgagcatctgataaatcttcgccagaatcgtccagctgaacttatcgccaaatttttggacgagaagctccgtgctgggaataagggtacttctgaagaagaattggagagcacccttgaaaaagtcttggttttgttcagatttatccagggtaaagatgtgttcgaagcattctataaaaaggatcttgcaaagagactccttttgggaaagagcgcatcgattgatgctgagaagtccatgatctctaagctcaagactgagtgcggtagccagtttacaaacaagctcgaagggatgtttaaggatattgaattgtcaaaggaaatcaatgagtcattcaaacaatcgtctcaggccagaacaaaactgccatcgggaattgagatgagtgtccacgttttaaccacagggtactggccaacatatccccctatggatgtcaaacttcctcatgaattaaatgtctatcaggatatcttcaaagagttctatttgagcaagtacagtggcaggaggttaatgtggcaaaattcactaggtcactgtgttctgaaggcagatttcaccaaagctaaaaaggagcttgctgtttccctttttcaggctgttgttttgatgttatttaacgatgcaatgaaacttagctttgaagacattaaagattccactggcatagaggacaaagaactgagaaggactctacagtcgcttgcctgtggaaaagtccgtatcctgcataagtatccaaagggaagagacgtacaagacggggatgaatttgattttaatgacacctttacagctcctctctatcgcattaaggtgaatgcaatccagatgaaagagactgtagaagagaacacgagtacaacagagagagtattccaggacagacaataccagattgatgcagccattgttcgaattatgaagacaagaaaagtcttaagccacactctcttaatcactgagctcttccaacagctgaaattcccaataaaaccggctgatctgaagaagaggatcgaaagcctgatcgatcgagagtacttggagagggacaagagcaaccctcagatatataattatcttgcttagtaatctcacctctctgctaaacgtcttttcaacattttattttattttattttatttcttactctgtatatttcttcaatctaaaaaaaaaagaactcgagatttcggttctttcttgccttttccgattttattcagcttgtatttcttcctaattttttccctttccttcgctgctagtataaatgagtgaataatctttattataagaaagaggttctcacaaaaaaaaaaaaaa

SEQ ID NO: 1564 - DNA, 2669 bp, Chrysanthemum coronarium
tttataaactttttatttcatatgtcttcacatcatcaacaaccttcaagcaccaccaccaacaaccgcaagcgcacatcctcctccgccgcctccgcctccgtaacgccaccgtcgtcaatcatgaaaaaagcgaaatcacaagtcggctcatcgtcttcttcttcctcacactcgttcgataacaaaaacggattccagtatcagattgagaatactactaatactaatagtggtgatgctatgattgaagatccggttgagatgacgtcatctggatatgcggctaatttggctaggaagaaggctactgtgccggttcctaataagaagcttgttattaagcttaaaggcaagccggccatgccgacaaacttggaggaggatagatggacagtcttgaagtctgcgattagtgccatatttttgaagcagccaggatcttgtgacttggagaaactttatcaagccgtcaatgatctttgcctctggaagatgggaggaagtctttaccaacggattgagagggagtgtgaagcccacatatctgctgctttacaatcattggttggtcaaagtgaagatcttgtagttttcttatcgcttgttcagaaaacctggcaagatttttgtgatcaaatgttgatgatacgtagtatagcgttgtttcttgaccggacatatgtgaaacaatcaccaaatgtgaaatcattatgggacatgggccttcaactttttcgtaagcatttgtcattagcttcagaagttgagcacaagacagtatttggccttctgaaaatgatagagagtgagagattaggtgaagcagttgatagaacacttcttagccatctcttgaagatgttcactgccttgggcatctactctgagagttttgagaagccattccttgaatgtacgtcagagttctatgccgctgaaggagtacgatacatgcaaaactcagatgttccagattatttgaaacatgtcgaggtaaggctacatgaagagcacgatagatgtctactttatcttgatgatcatacaagaaaacctttagtagcaactgctgaaaggcaactccttgagctccatatttccgctatacttgataagggtttcacaatgttgatggatggtaatcgaactcaagatcttaaacggatgtatacacttttctctagagtaggtgccttagaatccttacggcaggcccttagctcatacatccgaaaaacggggcagagcatagtaacagatgaagagaaggaaaaagatatggtgtcctcgctcttagagttcaaggtgtctcttgataaaatatgggaagatagcttctcgaagaatgatgtttttagcaatacaataaaagaggcatttgagcatctaattaatctccgccagaaccgccctgctgagttgatcgcaaaatttttggatgagaaacttcgtgctgggaataagggtacatcagaggaagaattggagggaactcttgataaagtcttggtgttgttcagatttatacagggtaaggatgtgtttgaagcattctataaaaaggatcttgcaaaaaggcttcttttgggaaagagtgcatctattgatgctgaaaagtccatgatctctaagttgaaaaccgaatgtggtagccagttcaccaacaaacttgaaggaatgttcaaggacatagagctatccaaggagataaatgagtctttcaggcaatcatctcaagctaggacaaagctcccttcaggaatcgagctgagtgtccacgtcttaacaactgggtactggccaacctatccaccaatggatgtccgccttccccatgaactgaacgtttatcaggacatttttaaagagttctacttgagcaaatacagtggtaggcgactaatgtggcaaaattcattaggtcactgtgtcttgaaagcagaatttccgaaaggcaaaaaggaactggcagtatccttatttcagactgttgttctgatgctgttcaacgatgcacaaaaacttagtcttcaagatatcagggatgctacaagcattgaggacaaggaactgaggagaactttgcagtctcttgcttgtggaaaagtccgtgtccttcaaaagattccgaaaggcagggaagtggatgataatgattcttttgagttcaatgatgcattcacggctcctctttatcgtataaaggttaatgctatccagttaaaagaaactgtggaagaaaatgcaagcactaccgagagagtattccaagatcgtcagtatcaggttgatgctgctattgtccggattatgaaaactaggaaaactttgagtcacacgcttctgataaccgaactatttcagcagctcaagtttcctataaaaccagttgacttgaagaagaggattgaaagcctgattgatagggaatacttggagagagacaagagcaatcctcagatctacaactacctagcgtaaacatcaactccaacaagtctacttgtacacggcatcgggattggatctttcacagtttccttgtctgtttatgtaaagtgatagcttttgttttcattgtaaagcctaattgtttaagcttctattgtagtattgttaaattaaatacttttattactcttacgtacacaactcttgagagcaag

SEQ ID NO: 1565 - DNA, 2801 bp, Triphysaria pusilla
atgaggagctcgtcttgagatttcatcactcttctatgtctcagcccaacacctccacctcctccaaccccatcaagcgctcatttaccccttattcctcttcctcctcaataaccacctcggtcgccggcgccgccgcatccccaattctcccggggatgaagaaagccaagtcccaggccgccgcgtgctcggtcgatggcagcaagagcggacagcagcagcagtctactcctcatgtccactttgctgacccacccgctctctccccgatgatcgaagaccatcctaacgacgtcgtaatgggggcctcttcgtcttccaatccttttggccgcggcgttgctgcttccggcggaggagtcacctccaatttgtctaggaagaaggccacgcctccgcagcccgcgaaaaaacttgtaattaagctcaataaagccaaaccgacactgccgactaatttcgaggaaaatacatggtccatacttaaatccgctataggcgccatatttttaaagcagcccaatccatgcgacctggaaaaactctatcaggtggtgaatgacctctgtctgcacaaaatgggcggtggcctataccaaagaattgagaaagaatgtgaagcttatatatctgcagctttacagtctctggtgggtcagagtgaggacttagtggttttcctgtcgctagtccagaaatgctggcaggatttttgcgaccagatgttgatgatccgtggtatagctttgtaccttgatcgcacgtatgtgaagcaaacaccgagcgtgcgctcgttgtgggacatgggtttgcagcttttccacaagcatctttccttagcttcggaggtggagcacaaaaccgtgtttggtcttctgaaattgatcgagggtgagagactaggggaagcagttaataggactcttcttaatcatctattgaagatgttcactgcattgggtatttatccagaaagctttgagaagccattccttgaaggtacatcggaattttatgcagctgaaggtgtaaaatatatgcaacaggcagatgttccggattatctaaagcatgttgagataaggttgcaagaagaacacgaaagatgcttactctacctcgacgctagcacacgaaagccgctcatagccacagccgagaaacaacttctcgagcgtcacgtatccgccattctggataagggtttcacaatgctgatggacgggaagcgtatcgatgatcttcagagaatgtatatgctcttctctaaggtcaacgccttagaatctttgaggcaagcccttaatcagtatatccgtaggaccggccacagtattgtcatggacgaggaaaaggacaaagagatggtatccagcttattggattttaaggccaatcttgatcggatttgggaagatagctttttcaaaaatgagtcatttagcaatactatcaaggatgctttcgagcatctcattaatatccgccagaaccgacctgctgagctgattgccaagtttgtggatgagaagcttcgtgcgggaaataagggtacgtcagaggaagaattggagggtacactcgacaaagttttggtcttgttcagatttatacagggtaaggatgtgtttgaagcgttctataagaaagatcttgctaaaaggctcttgctgggcaaaagtgcatctattgatgcggagaaatcaatgattactaagttgaaaactgaatgcggcagtcaatttaccaacaagctcgaaggaatgttcaaggacattgagttgtcgaaagagatcaacgagtcgttcaagcaatcatcccaagctcggaccaaactgccatctggaatcgagatgagtgtacacgtcttaacaactgggtattggccaacttatcctccaatggatgttcggctgccccacgaactcaacttgtaccaggatatttttaaggagttttacttgagcaaatacagtgggcggcgattgatgtggcaaaactcattgggtcaatgtgttctgaaagccgaatttcctaaaggtaaaaaggagctggcagtttctctatttcagactgttgtgttgatgctattcaatgatgcgcaaaagctaagctttcaagatattaaggaatcgaccggtattgaggataaagagctcaggaggacattacagtcccttgcttgtgggaaattccgcattcttctgaagaatcctaagggcagagatgtagaagacgatgacgacttcgtttgtaatgatcagtttgctgctcctctatatcgtataaaggtaaatgcgattcagatgaaggaaacagttgaggagaatgccagcactacagaacgggtatttcaagaccgtcaataccaggtcgatgctgctattgttcgtataatgaagactagaaaagttctgagtcacactctactaataaccgaactcttccaacagctcaagttcccaataaaaccggccgacttgaagaaaaggatcgaaagcctcatagacagagagtatcttgagcgcgacaaaagcaacccgcaagtgtacaactaccttgcgtgatgcgtctcgactataaggtacaactctcttttttcggtctcttactaaagaatgaattccgtttatcggaaactcatgaaccgacgaattgtgtacaggaaccaacagctgttattgttattattttcaaatttctgtttttatttcggtttttgatgtttatgtataactaaaggatatttcatatttccttttaacatgttcccatgaaactacttcaatttattatgg

SEQ ID NO: 1566 - DNA, 2526 bp, Amaranthus tuberculatus
tacacagcctctgagtgattactctcatcgtaacgttgtttcttcttctgattctcgctcaaccatcgctgctaatttgtctcgtaagaaggctacaccacctaatccttctaccaagaagcttgttatcaagcttgttaaagctaagcccacattacctcctaatttcgaggaagatacttgggctaccttaaagtcagccatcagtgctatatttttgaagcagcctgattcatgtgacctggagaaactttatcaagctgttaatgatctttgcctgcacaaaatgggaggcagcctctatcaacggattgagaaggagtttgaggcacatatttctgctatattgcattcaatggtgggccaaagtccggatttagtagtctttctctcacttgttgagaaatgctggcaggacctttgtgaccaaatgctgatgattcgtggcatagctttgtatcttgataggacatatgtgaaacagaccccaaatgttaaatcattgtgggacatgggattacagattttccgtaaacatctttctttatgtgctgaagttgagcataaaactgttacaggcctattgagaatgattgagaaggaaagattaggtgatgctgttgataggactcttctgaatcatctcttaaaaatgttcactgctcttggaatttaccaagaaagctttgcaaaaccatttcttgcctgcacagaagaattttatgctgctgaaggtgttaagtatatacagcagtctgatgttccagattacttgaagcatgttgaaatgagattgcatgaagaacatgaacgctgtcttttgtacttggatgctagtactaaaaaacctctcatctcaacagccgaaaagcagctcctggagcgtcatatatctgccatacttgataagggctttaatatgctgatggatggatgtcgtatagatgacctacggaggatgtacgatttgttttccagggttgaagcacttgagtcactgaggcaggcaattagttcttacatccggaaagctggtcaggctacagttatggatgaagagaaagataaggacatggttacctgcctcttgaatttcaaggcaactcttgataaaatatgggaagaaagtttttcaaagaatgaatcttttggtaacactatcaaagaatcgtttgaatacctcattaatctacgtcagaaccgtccagcagagttgattgcaaagtttctggatgagaagcttcgagctggaaataagggaacctcagaagaggaattggagggcactctggataaagtcttggtcttattccgatttatacagggcaaggatgtatttgaagcattttacaaaaaggatcttgctaagaggcttttgttaggaaagagtgcttcaattgatgctgagaagtctatgatcacaaagctcaaaactgagtgtggtagtcaatttacgaacaaacttgaagggatgttcaaggatattgaattatcaaaagaaataaatgattcttttaaacaatcttctcaagcacgaacgaagcttccatcaggaatagagatgagcgtccatgtcttaaccacagggtactggccaacataccccccaatgaatgtccggctcccacatgagttgaatgtataccaggacatatttaaagagttttatctaagcaaatacagtggtagacggctaatgtggcaaaactccttgggccattgtgtactgaaagcagacttcccaaagggtaaaaaagagcttgcagtttccctctttcaggctgtagttttaatgctatttaatgatgctgagaagctgagcttccaagatattaaagatgctaccggaatcgaggataaagagctgcgtagaactcttcagtctcttgcatgcggcagagttcgtgtacttcagaaggttcctaaaggcagagaagtggatgataatgactcgtttgtgttcgatgagctatttagtgctccactttatcgtataaaggttaatgcgatccagatgaaggaaacagtggaggagaatacaagcaccaccgagagagtgtttcaagatcgtcaatatcaggttgatgctgctattgttcgtatcatgaaaacgaggaaggtgcttagtcatactctacttataacagagctcttccaacagctcaagtttcccataaaaccagttgatctcaaaaagaggattgagagccttatagaccgagagtatttggagcgagacaaaaataatcctcaaatatacaattacttggcgtaacggcttaattcacaattgagctcgtcttcatgacacgaggaaaaccggttatgaatgcttatagtctgatattgtacagtaaatacatcgatctttcaatttgtttttccatttacgatgtgtagatgtaattttttccccataatggaagatatgcctttgcattgcattttttttaacattgtcaaaatgaggagcaatattgtgtaaaagatcagcaaatgttaatcagttatgagtacgatggtcgc

SEQ ID NO: 1567 - DNA, 3179 bp, Petroselinum crispum
cacaggaataaggtacaaaaatgaggtaggctaggctgcatataaaatcaaaagtatacatacacagtcgtatatctatatgtctaacccacacagcagcagcagctcctccaccaccaacaactcaaacaaacgctcttcatcttcttcttcaaacaccgccgcgccgttttattctccgatgaagaaagctaagtctcaggcggtcgcgaacggtctctcacaacacgttcgattcgatgaaaacgaagctatgattgacgatcctaaccctaacgacgtcgttgatccttctccgtcggggaatagagcttctgctggtgggattacggctaatttagcccggaagaaggcggaggctactccgcctcagccggcgaagaagcttgttattaagcttaataaagctaaaccgaagatacctacaaactttgaggagactacatgggaaaaattaaagtccgcaattactgccatattcttaaagcaaccagattcttgtgatttagagaagctctatcaggctgtcaatgacctctgcctgtacaaaatggggggaagtgtttatcagcgaatcgaaaaagaatgtgagacacacatctccgctgcattacaatcattagtaggacaaagtgaagatctcgtggttttcttgtcacttgttgaaaagtgctggcaagatttctgtgatcagatgttgatgatccgtggcatagcgttatatcttgatcgcacttatgtgaaacagactccaaatgtgcgttcattatgggacatgggtttgcagctgtttcgcaaacatcttgcactagcttcagaagttgaacacaaaactgtatttggtcttcttaaaatgattgagagtgaaagacgaggcgaagcagtgggtaggactctccttaatcatcttctaaagatgttcactgcattaggaatttattcggaaagctttgagaaaccatttcttgaaggcacttctgagttttatgctgctgaaggagtacaatacatgcaacaggcagatgttcccgactacctgaaacacgtggagataaggttgcatgaggaacatgacagatgtgtactttacttggatatttgtacaagaaagccccttgtagcaactgcagaacgacaacttcttgagcgccatatttcggcaattcttgataagggtttcactatgctgatggatgggagtcgcattgaggaccttcaaagaatgtacatgcttttcagcagagttgatgcccttgaatcactaagacatgcacttaactcttatatcagaaagactggacaaggaattgttatggatgaagagaaggacaaagatatggtgtcttgcctcttagaattcaaggcatcccttgatagaatattggaagatagcttttctaagaatgaagcgttttgcaacacagtcaaggatgcatttgagcatctcattaatcttcgccagaaccgtcctgctgaattaattgctaagtttttggacgagaaactccgtgccggtaataaaggtacatcagaggaagagctggaaggaatgcttgataaagtattggtgttgttcagatttatacagggtaaagatgtatttgaagctttctataagaaggacctagcgaaaaggcttctattaggaaagagtgcttctattgacgctgaaaaatcaatgatttctaagctgaagacagagtgtggcagtcagtttacgaacaaacttgaagggatgtttaaggacattgaactgtcaaaggagataaatgaatctttcaagcagtcatctcaagctaggacaaagctcccatcaggaatcgagatgagtgttcatgttctaacaacagggtactggccaacataccctcccatggatgttcggcttcctcatgaactcaatgtctaccaggacattttcaaggaattctatttaagcaagtatagtggaaggcgattaatgtggcaaaattcactaggtcactgtgtcttaaaagcagagttccccaaaggtagaaaggaactggcagtttctctatttcagactgttgtattgatgctgtttaacgatgccgaaaagctcagctttcaagatatcaaggatgcaactagcatcgaggataaggaacttaggaggactcttcaatctcttgcctgtggtaaagtcagagtcctccaaaagcttccaaaagggagagaagtggatgataatgattcattttcatttaatgatcaatttgctgctcctctctataggataaaggtaaatgcaatccagatgaaggaaacagtggaagagaacacgagcaccactgaaagagtgtttcaggaccgccaatatcaggttgatgctgctattgttcggataatgaagacacggaaagtgctgagtcatactttgcttataactgaactttttcagcagcttaaatttccaataaagccatctgatctgaagaaaaggattgagagcctcattgacagagagtacctggagcgggacaaaagcaatcctcaaatatacaattacctggcgtgaaacatgaatgcctatttactgtcgaagaccaatgaagcagcaatatctcccaaaagatcctcgagtcagacctgtacaggaattttcaattttacatgtactttagctttttctttttaatgttgtactctgtatccataagcatgttttctggttatattttgctttgagatcagtttttacttggatcaagtatacatgagatagtgcatctttacaagaattgacctttttgttgctatgctgtcggatgtttcatttaggatgttggtacaattttactctttagttaaattgtcttaggtcagtaagcacattaacagagtattgtgaacatctttggaagggtaaaagcctgagatcacaatttagaatttttgcattgggagggtaaaagccaaaagatcacaattttgaatttttgcacaaaaagtgtaggagacacaaatataccacaaattgtttatacagccgatggtaattgatgctggttgtgcgtgcaaaaactatgctataattttaatatttttggtatcacatgattgtttgggtattttttctatcacatactttaaatgggtatttctgaattgctgaaatgatgtgttatcgtttgagtgagtgactgttctgcttttgc

SEQ ID NO: 1568 - DNA, 2480 bp, Brassica oleracea
tgatttcacctctccctaacttttcatgtctcttccaaccaaacgctctacttgctccgccgcttcttctgcctctaccgactcttctttctcttccccgccgatgaagaaggccaaaaacggcctccacgccccttcctctcagcctaacgcctccgacaaggctggcttctccatggaggaagatccagctccctccgccgccgctaatctctctcggaagaaggccacactccctcaccccactaagaagctcgtcatcaagctcaataaagcgaaaccaagtctacctacaaactttgaagatactacatgggaaaatctccagtcagctatcagagctatattccttaaacagccttttccttttgacctcgagaggctttaccaggctgttgatgacctttgcttgcataagctggaaggaaagctttacgaacggattgagaaagagtgtgaagaacacatctcttcagctttacaatctttagttggccaagacaccgatctctctgttttcttgtcgctcgttgagaaatgctggcaagatttctgtgaccagatgttgatgattcgtagtatagccttgtctctggataggaagtatgtgatacaacatacaaatgtacgttcattgtgggagatgggcctgcagctttttcggaaacatctttctctgtcccctgatgttgagcagaggacagttactgctctcttaagaatgattggaagggaaaggttggccgaagctgttaatagaacactactaagccatctcttaaagatgtttactgcactgggaatatatgcggaaagctttgagaagcagttccttgaatgcacttctgagttttatgctgctgaaggaatgaaatacatgcagcagtatgacgttcccgagtacctgaagcatgtcgagggaaggttgcatgaagagaacgaaagatgcatactgtatatagatgcatcaaccaggaaaccattgatatcagctgttgaaaagcaacttctcgagcgtcatatacatgctgtccttgataagggtttcacaccgttgatggatgggcgtcgtaccgaggacctccagaggatgtacaccctgttttctagagtcagtgcacttgagtctctgaggcaggccctaagttcctacatccggaaaactgggcagaagattgttatggatgaagagaaagataaagatatggtacaatcactattggacttcaaggcttctcttgacatagtatgggaagagagtttttgcaagaatgaatcatttggcaacaccattaaagattcgtttgagcatctgataaatcttcgccagaatcgtccagctgaacttatcgccaaatttttggacgagaagctacgtgctgggaataagggtacttctgaagaagaattggagagtacccttgaaaaagtcttggttttgttcagatttattcagggtaaagatgtgttcgaagcattttataaaaaggatcttgcgaaaagacttctgttgggaaagagcgcttcaattgatgctgagaaatcaatgatctctaagcttaagaccgaatgtggcagccagtttacaaacaagctcgaaggaatgttcaaggatattgaattgtcaaaggaaatcaacgagtcattcaaacagtcgtctcaggccaggacaaaactgccatcaggaattgagatgagtgtccacgttttaacaacagggtactggccaacatatccacctatggatgttaaacttcctcatgaattaaatgtctatcaggatatcttcaaagagttttatttgagcaagtacagtggaaggaggttaatgtggcaaaactcattaggtcactgtgttttgaaggcagatttctccaaaggtaaaaaggagcttgctgtttccctgtttcaggctgttgtgttgatgttattcaacgatgcaatgaaacttagctttgaagacattaaagattccactggcatagaggacaaggaacttagaaggactctgcagtcgcttgcttgcgggaaagttcgtgtcctgcagaagtatccaaagggaagagacgtacaagacggggatgaatttgattttaatgacacctttacagctcctctctatcgcattaaggtgaatgcaatccagatgaaagagacagtagaagagaacacgagtacaacagaaagagtattccaggatcgacaataccagattgatgcagccattgttcgaataatgaagacgagaaaagttttgagccatactcttctaatcaccgaactcttccaacagctcaagttcccaataaaaccggctgatctgaagaagaggatcgaaagcctgatcgatcgagagtacttagagagggacaagagcaactctcagatatacaattatcttgcttagaatatctctctgttgaacgccttttacaacgtttttttttcttctctgtatatatattcacaaacaatggccg

SEQ ID NO: 1569 - DNA, 2632 bp, Daucus carota
ggtgattaggatataaaaggcaaagctatacatacacagtcgtatatctatatgtctaacccacacagcagcagcagctcctccaccaactctaacaaacgctcctcttcttcttcgtcttccaatctcgccgccggcgaagcgccgtatttttctccgatgaagaaagctaagtctcaggccgtcgcttgttcgctcgattccaacaagaacggccacgttcgattcgatgacaacgacgctatgatcgacgatcctaatcctaatgatccttctccgtcggttattagagcttcggccggggggattacgtctaatttggcgaggaagaaggcgacgccgcctcagccggcgaagaagtttgttattaagcttaataaagctaaaccgacgatacctacaaactttgaggagactacatgggaaacattgaagtccgcaattaccgccattttcttaaagcaaccagatccatgtgatttggagaagctctatcaggctgtcaatgacctttgcctgcacaaaatggggggaagcgtttatcagcgaattgaaaaagaatgtgagacacacatctctgctgctttacaatcattagttggacagagtgaagatcttgtggttttcttatcacttgttgaaaagtgctggcaagatttctgtgatcagatgttgatgatccgaggcatagcattgtatcttgatcgcacttatgtgaagcagactccaaatgtgcgttcattgtgggacatgggtttgcagctgtttcgcaaacatcttgccctagcttcagaagttgaacataaaactgtatttggtcttcttaaaatgatcgaaagcgagagacgaggtgaagcagtggataggactctccttaatcatcttttaaagatgttcactgcattaggaatttattcagaaagctttgagaaaccattccttgaaggcacttccgagttctatgctgctgaaggagcaaaatacatgcagcaggctgatgttcctgactacctgaaacatgtggagataaggttgcatgaggaacatgacagatgtgtactttacttggatattggtacaagaaagccccttgtagcaaccgcagaacgacaacttcttgagcgccatatttctgcaattcttgataagggtttcactatgctgatggacggcagtcgcattgaggaccttcaaagaatgtacgttcttttctgcagagttgatgcccttgaatcacttaggcatgcacttaactcatatatcagaaagactggacaaggaattgttatggatgaagagaaggacaaagatatggtatcttgccttttagaatttaaggcatctcttgatacaatattggaagatagcttttctaagaatgaagctttttgcaacacagtcaaggatgcatttgagcatctcattaatcttcgccagaaccgtcctgctgaattgattgctaagttcttggacgagaaactccgtgccggaaataaaggtacatcagaggaagaattggaaggaatgctcgataaagtattggttctgttcagattcatacagggtaaagatgtatttgaagctttttataagaaggacctagctaaaaggcttctattaggaaagagtgcttccattgatgcagaaaaatcaatgatatctaagctgaagacagagtgtggcagtcagtttacgaacaaacttgaagggatgttcaaggacattgaactgtcaaaggagataaatgaatcttttaagcagtcatctcaagctaggacaaagctcccatctggaattgagatgagtgttcatgttctaacaactgggtactggccaacataccctcctatggatgttcggcttcctcatgaactcaacgtctaccaggacattttcaaggaattctacttgagcaagtatagtggaaggcgattaatgtggcaaaactcactgggtcactgtgtcttaaaagcagagtttcccaaaggtagaaaggaactggcagtttctctatttcagactgttgttttgatgttatttaatgacgccgaaaagcttagctttcaagatatcaaggatgcaactagcattgaggataaggaacttagaagaactctacaatctcttgcttgtggaaaagttagagttctccaaaagcttccaaaagggagagaagtggatgataatgattcattttcattcaacgatcagtttgctgctcctctctataggataaaggtaaatgcaatccagatgaaggaaacagtagaagagaacacaagcaccactgaaagagtgtttcaggaccgccaatatcaggttgatgctgctatcgttcggataatgaagacaaggaaggtgttaagtcatactttgctgataactgaactctttcagcagcttaaatttccgataaaaccatctgatttgaagaaaaggattgagagcctcattgacagagagtacctggagcgggacaaaagcaatcctcaaatatacaattacctggcatgagccgtgaatgcctatctctttgaaaagatcctccaaagtcggacctgtacaggaattttcacttttacatgtactttagttttctcaacactgttgtactctgtatccataaaggcat

SEQ ID NO: 1570 - DNA, 2924 bp, Elaeis guineensis
gagctccctccctccctttctcttccccgctgtcgaatcctcgccatgcgcttctacgattgattgatgactcgcgcaaagcggcccctctccagcgtcagcagcagcggcggcggcaggaccactacccacagcacctcctccggcggagtcattggaagcccagtctctccatccgccacctcctcctccgccatgaagaagttcaagtcccagccgcccgccgccgctgctgtcgagagggagaagaacggcctccatccccacagcacccacttcgaccccgcggcggcggcggaggcggccgcccaacccgccggggaggaggaccccatgctcgtagaccaggaggacctcaaggctggcgcatccactgccatcacctccaccggcgtcgctgccaacctctccaggaagaaggctacccctcctcagccgttggccaagaagcagctcatcatcaagctcgttaaagggaagccgactctgccaacaaattttgaagaagatacatgggcaacattgaagtctgctattacagctatatttttgaagcagcctgatccttgcgactctgaaaagctttatcaggctgtcagtgatctttgtttacacaagatgggaggaaatctttatcaacgtatagagaaggaatgtgaagtacatatttcaacaacactattcgcattggttggtcagagccctgacttggttgtatttttatcattagttgaaaaatgctggcaggatttttgtgaccaaatgttgatgatacgtggtatagcgttatatcttgatagaacttatgtcaagcaaaccccaaatgttcggtcattgtgggacatggggttgcagttgtttcggaagcacctctccttatgtccagaagttgaacacaagattgtcaccggtcttttgaggttaattgagcaggagagactaggtgaagctattgataggacagtacttagtcatcttttaaagatgttcacggctcttggaatttacacagaaagctttgagaagccctttctcgaatgcacctctgagttttatgctgctgaaggtgtgaaatatatgcaacagtcagatgttccagactatttgaaacatgtggagtcaaggctacatgaggaacatgaaagatgcttgctctacctagatgcaaatacaaggaagccccttgtagcatccactgaaaaacaactccttgaacgccacacatctgcaattcttgacaagggatttacaatgctaatggaagcaaatcgtgttgaggaccttcagagaatgtacacactctttcagagggttaatgctctggagttgttaagacaagctcttagctcatatattcggggtaccgggcaaggcattgttatggatgaagagaaagacaaagatttggtttcctatctcttggagtttaaagcatctctggatacaatcttagaagaaagtttcttcagaaatgaagctttttcgaataccataaaggattcttttgagcatctcattaatcttcgtcagaatagaccagctgaactgattgcgaaatttctggatgagaagcttcgtgctggcaacaagggtacgtctgaagaagagttggagggtacacttgatagagtgttggtcttatttagatttattcaaggaaaagatgtctttgaggcattctacaaaaaggatctagcgaaaagattattgttgggaaagagtgcatcaattgatgccgaaaagtcaatgatttcaaaactgaaaactgagtgtggaagtcaattcacaaataaacttgaagggatgttcaaggacattgagttatcgaaagagattaatgattcctttaagcaatcatcccaagccagaacaaaacttccaactggtattgaaatgagcgtccatgtcctaacgactgggtattggccaacatatcctcctatggatgttcgacttccacatgaactgaatgtttatcaggatatatttaaagagttctatttgagtaagcacagtgggaggcgcttgatgtggcaaaattcattaggtcactgtgttttaaaagcagaatttccaaagggtaaaaaagaattggcagtgtcattattccagactgttgtattaatgctgttcaatgatgctcaaaagctcagttttcaagatattaaagactcaactggcattgatgataaagagcttaggaggactctacagtcacttgcatgtggcaaagtccgagttctccagaagatcccaaaaggaagagaagtagaggatgatgacacatttgtgttcaatgaagaattcagtgctcctctctaccgtataaaggtaaacgcaattcaaatgaaggagacagtggaagaaaacacaagcaccactgaaagagtatttcaagaccgtcaatatcaggttgatgcggctatagtccgtatcatgaagacaaggaaagtactaagccacacgcttttaataactgagctctttcagcagctaaaatttccaataaaaccagcagacttgaagaaaaggatagagagcctcatcgacagggaatatctggaacgggacaagaacaatcctcagatctacaattacctggcttaaccccttctgcacgctcaagaaacctcttctaccagcaaatgagggagttgactcctctcgaaggtcatgcttcgggggttgctttagcaatctcttgatgtcaaccggtgtacaggaagaagcaacatttttcctttgttccgagtgacaagtcaatactgtaaaaaatcaagttccactgtgttttttcttcttgttgtggaattaatcattataaattttttaaaacaagtgctccttcgcacgttgcagcaatattttcacttcctgctgctgttgaagatgagaaaaatcacaggcctgatcatcgcagttta

SEQ ID NO: 1571 - DNA, 2403 bp, Ambrosia trifida
ctctaatcttaatagcaacaacaacaataatataataatattaatctcaatatcatatgtcgcaaccctacaccaccaccgaaagcgttcatccacacctgcacatcaccaaccatgaagaaggccaaatcacaacaattcgataacaataatcctccctctctccacgatccttcttccatgatcgtagatccatctcaaaacgacgccgttcgctccaccgctggatttacagccaatttggctcggaaaaaagctacgccgcctcaacctgctaagaagcttgttatcaagctgcttaaagctaaaccaaccttgccatcaaacttcgaggagactacgtgggtagtcttgaagtcagcaattagtgccatattcttgaagcagccagatcattgtgatttagagaagctttatcaagcagtcaatgatctttgcctccacaagatggggggaagtctttacgaacggattgagaaggaatgtgaggcccacatatcttctgctatacaatcattagttggtcaaagtgaagaccttgtggtttttctatcacttgtgcaaaaaacctggcaagatttttgtgaccagatgttaatgatccgtggtatagcgttgtatcttgaccgtacatatgtgaaacaaactccatctgtacgatcattatgggacatgggccttcaactcttctggaagcatttgtcacaagcttcagaagttgaacacaaaacagtattcggccttctgaaaatgatagagagtgagagattaggtgaagctgttgatagaacacttcttagccatctgttaaagatgttcactgccttaggcatttattctgagagttttgagaaaccattccttgattgtacatcagaattctatgctgctgaaggagtaaaatacatgcaacactcagatgtcccagattatttgaaacatgtggaggtaaggttgcatgaagaaaacgacagatgtctactatatcttgatgctagtacaagaaaaccattggtagcaactgctgaaaaacaactccttgagctccatatatcggcaatacttgataagggtttcacaatgttaatggatggtaaccgtactcatgatcttagaaggatgtatacacttttctctagagtaaatgcccttgaatccttaagacatgccctaagtgcatacatcagaaaaacagggcaggggattgtaactgatgaagaaaaggacaaagatatggtgtcttccctcctagagttcaaaatgtctcttgataaagtatgggaagatagcttctcgaagaatgatgtttttagcaacacaattaaagaggcatttgagcatctaattaatctccgccagaatcgtcctgctgaactgatcgcgaagtttttggatgagaaactccgtgctggaaataagggtacgtctgaagaagaattggagggcactcttgacaaagttttggttctctttagatttatacagggtaaagatgtgtttgaggcattctataagaaggatcttgcaaaaaggcttcttctgggaaagagtgcatcgattgatgctgagaagtcaatgatatccaagttgaaaaccgaatgtggtagccagtttaccaacaagcttgaaggaatgtttaaggacatagagttatcaaaggagataaatgaatcatttaaacaatcatctcaagctaggacaaaacttccttcaggaattgagatgagtgttcatgttttaacaaccggttactggcctacatatccaccaatggatgtccgacttccccatgagttgaatgtttatcaggacatttttaaagagttctacttgagcaaatatagtggtaggcgattaatgtggcaaaattctttaggtcactgtgtcttgaaagcagaatttccaaagggaaaaaaagaactggcggtttctttatttcagaccgttgttctgatgctgttcaacgacgcacaaaaacttagttttcaagatattaaagatgctactaacattgaggacaaggaactaaggagaactctgcagtcacttgcttgtggaaaagtccgcattcttcaaaagatgcccaagggtagggaagtggatgacaatgattcattcatgttcaatgacgtgtttactgctcctctttatcgtataaaggttaatgctatccagttgaaggaaactgtggaagaaaatgcaagcactacagagagagtattccaagatcgtcagtatcaggttgatgctgctattgttcggataatgaaaactaggaaaattttgagtcacacacttctgataaccgaactcttccagcagctcaagtttcctataaaaccggttgacttgaagaagaggattgaaagcctaattgacagggagtatttggagagggataag

SEQ ID NO: 1572 - DNA, 2508 bp, Brassica oleracea
tttcacctcacctctctctcccgatttttcatgtctcttccaaacaaacgctctacttgccccgcagccgcttcttcagcctccaccaccgactcttcttactctcccccacctcccatgaaaaagtccaaaaacggcctccacactccctccgataaggttcccttccccatggaggacgaagatccaaccccctccgccgcagccaatctctcccggaagaaggctactctcccccaccccactaagaagctcgtcatcaagctcaacaaagccaaaccaactctaccaacaaactttgaagacactacctgggctaatctgcagtcagctatcagagctatattcctcaaaaagcccttttctttcgacctcgagaggctttaccaggctgttgatgacctttgcttgcataagctggaaggaaagctttacgaacggatgcagaaggagtgtgaagagcacatctctgccgctttacattctttagttggccaagacaccgatctctctgttttcttgtccctcgttgagaaatgctggcaagatttctgtgaccagatgctcatgatccggagtatagccttgtctttggataggaagtatgttatacagaacccgaatgtacgttcattgtgggagatgggccttcagctttttcggaagcatctttctctgtcccctgatgttgagcagaggactgttactgctctcttgagaatgattgaaaaggaaaggttagccgaagctgttaataggacactactaagccatctcttaaagatgtttactgcactgggaatatatacggaaagctttgagaaacctttccttgaatgcacttctgaattttatgctgctgaaggaatgaaatacatgcagcagtatgacgttcccgagtacctgaagcatgtcgagggaaggttgcatgaagagaatgaaaaatgcatactgtacatagatgcatcaaccaggaaaccattgatatcaactgttgaaaagcaacttctcgagcgtcatatagttgctatccttgataagggtttcacaccattaatggatggacgtcgtactgaggacctccagaggatgtacaccctgttttctagggtcagtgcacttgaatctatgaggcaggcgttaagttcctacactcggaaaaccgggcagaagatcgttatggatgaagagaaagataaagatatggtacaatcactattggacttcaaggcttgtcttgacatagtatgggaagatagcttttgcaagaatgaatcatttggcaacaccattaaagattcatttgagcatctgataaatctgcgccagaatcgtccagctgaacttatcgccaaatttttggacgagaagctccgtgctgggaacaagggtacttctgaagaagaattggagagtacccttgagaaagtcttggttttgttcagatttattcagggtaaagatgtgttcgaagcattttataaaaaggatcttgcaaagagactcctgttgggaaaaagcgcttccattgatgctgagaaatcaatgatctctaagctcaagaccgagtgtggtagccagtttacaaacaagcttgaagggatgttcaaggatattgaattgtcaaaggaaatcaatgagtcattcaaacagtcgtctcaggccagaacaaaattgccatcaggaattgagatgagtgtccacgttctaacaacagggtactggccaacatatccaccaatggatgttaaacttcctcatgagttaaatgtctatcaggatatcttcaaagagttttatttgagcaagtacagtgggaggaggttaatgtggcaaaactcattaggtcactgtgttttgaaggcagatttctccaaaggtaaaaaggagcttgctgtttccctgtttcaggctgttgtgttgatgttatttaacgacgcaatgaaacttagctttgaagacattaaagattccactggcatagaggacaaagaacttagaaggactctgcagtcgcttgcttgtgggaaagttcgtgtattgcagaagtatcccaagggaagagatgtacaagacggggatgaatttgattttaatgacacctttaccgctcctctgtatcgcattaaggtgaatgcaatccagatgaaagagacagtagaagagaacacgagtacaaccgagagagtattccaggaccgacaataccagattgatgcagccattgttcgaatcatgaagactagaaaagtcctgagccatactctcctaatcaccgagctcttccaacagctgaaatttccaataaaaccggcggatctgaagaagaggatagaaagcctgatcgatcgagagtacttggagagggacaagaccaaccctcagatatataattatcttgcttagtcataatctctttgctaaacagtcttttcgacatttatctctgctctgtattactgtatatttattcacaagacaatggccgagactttctgaaaaagaaca

SEQ ID NO: 1573 - DNA, 2802 bp, Rosmarinus officinalis
aaaaaagaagaaacgaaaacacagtttcttcttctcctataatgaggagctcgagctttccttgagattcacactctttctatgtctcaccccgcctcctccacctccacctccaaccccagcaagcgctcctcgtcctcccctcattccgccgccgccgcagctccaattctccccgcgatgaagaaggccaagtcgcagtcgcagcacaatacaccgcacgtccacttctccgaatcaaccgccctctcgccgatgatcgaggacaatcccagcgacgccgcgctggaggcctgctccccttccagtgccttcggccgcaccggcgctgcctccggcggcggcgtcaccgccaatttgtcgcggaaaaaggccaccctcccccagcccacgaagaagctcgtaattaagctcaacaaagccaaaccgatgctgccgattgacttcgaggaaaatacatgggcgacactcaagtctgctatcagcgccatatttttgaagcaacccaatccatgcgacttggagaaactctatcaggcggtgaatgacctttgcctgcacaaaatggggggaagcctctatcaacgaattgaaaaagaatgcgagacctacataagtgctgcccttcagtctttggttggccaaagtgaagatctcgtggttttcttatcgcttgttcagaagcggtggcaggacttttgcgaccagatgctaatgatccggggtatagcattatatctagacagaacgtatgtgaagcaaacaccgaacgttcgctcattatgggacatgggcttgcagcttttccacaaacatctttccctagcttcagaagtagagcgcaaaaccgtattcggtcttctaaaaatgattgaaagtgaaagactaggcgaagcagttgatagaactctacttaatcatctattgaagatgtttactgcattgggtatttatccagaaagctttgagaagccattcctcgaaggtacatcagagttttatgcagccgaaggtgtcaaatacatgcagcaggcagatgttccagattatttaaagcacgtagagatgaggttgcaagaagaaaacgaaagatgtctaatctacctggatgcaagtacaagaaagccactagtagcgactgcagaaaggcaactgctcgtgcatcacataaccgccattctcgataagggtttcatgacacttatggatgggaagcgtatcgaagaccttcagaggatgtatatgctcttctccagagtcgatgccctcgaatcattgaggcaatccctgaatcagtacatccgaagaactggacagagcattgtcatggatgaagagaaggacagagatatggtgtcgagcttgttggaatttaaggataatcttgatagaatatgggaagaaagcttttccaaaaacgaagcgtttagcaacaccatcaaggatgcatttgagcacctcattaatatccgtcagaatcggcctgcagagctaatagccaagtttgtcgacgagaagcttcgtgcgggaaacaagggtacctcagaagaggaattggagggtacactcgataaagtgttagtcttgttcagatttatacagggcaaggatgtatttgaagctttctacaagaaagatcttgctaaaaggctcttgttaagtaaaagtgcttcaattgatgcagagaagtctatgattaccaagttaaaaactgagtgcggcagtcaatttactaacaaactcgaaggaatgttcaaggacattgaactgtctaaagagattaatgaatcattcaagcaatcatctcaagctcggacaaaactcccatcagggatcgagatgagcgttcatgtattaaccactgggtactggccgacctatcctcccatggatgtccggctcccgcacgagctcaatgtttatcaggacatttttaaggagttttacttgagcaagtatagcgggaggcgattgatgtggcaaaactcattaggtcattgtgttcttaaagcagatttcccgaagggtaaaaaggagctggcggtttctctatttcagactgttgtattgatgctgttcaatgatgcacaaaatctttgctttcaagatataaaagaatctacaggtatagaggataaagagctgagaaggactttgcagtcccttgcatgtgggaaagttcgcgttcttcaaaaaattcctaaaggcagagatgtggatgatgaggactcctttgtcttcaatgatcaatttactgctccgctgtatcgtataaaggtaaatgcaattcagctgaaggaaacagtcgaggagaatacaagcaccaccgagagggttttccaagatcgtcaatatcaggttgatgctgctatcgttcgtataatgaaaacgagaaaaatgctgagtcacactctcctgatcactgaactctttcaacagctgaagtttccgataaaaccagccgatttgaagaagaggatcgagagcctcatcgaccgagagtacctggagcgcgacaaaaacaacccacaaatatacaactaccttgcgtgaaaaaagtcatcacaaggtaacatcatttttccttgtataaacgacatgggaaatacgcggtttgatcaagatcgtcgaagctcaggaatccgagaaaactgtgtacaggaactgatagctgtctttttctctcttctcgcttttcgttgtcatgctcaatgtaagtatattttcttaaaaaatttgtctcagattaaatctctgtccaagagtaatattatcatgaaaaatagattaaacatttctcca

SEQ ID NO: 1574 - DNA, 2868 bp, Glycine max
ctttcctctttagtttggttcgggtgacaaaacaaaacacaatggtgtgttgatcactctgtcttctctttctctctttccatttgatgtctctccccaccaaacggtcgagcaccgctggttcctccctgtcgccgccacctcctatgaaaaaggccaagtccctcctcctccgctcctcctccgacgaccacgacgccgttttggacccttcctccatgcctctcgacgacgatctccccaatgcccgcgccgccaatctcgcccgcaagaaagccaccccgccccaacccgccaagaagctcctcatcaagctccacaaagctaaaccaacattgcccacaaatttcgaggaggatacatgggcaaaactaaagtctgccatttgtgctatatttttgaagcaacctaactcttgtgacttggagaagctttatcaggctgtgaacgatctctgcctttataaaatgggtggaaatctttatcaacggattgaaaaggagtgtgaagcacatatatctgctgcactgcagtctttggttggccaaagcccagatttggttgtttttctgtctctagttgagagatgttggcaggatctttgtgaccaaatgttgatgattcgtggtatagccttgtatctagataggacatatgtgaagcaaacagcaaatgtccgatcattatgggacatgggcttacaacttttccgcaaacatctttcattgtctcctgaagtagaacacaaaactgttacaggtcttctacgaatgattgaaagtgaaagaaaaggtgaagcagtggatagaactcttctaaaccaccttttgaagatgtttactgctctgggaatttatgcagaaagctttgagaagccattccttgaatgcacatctgaattttatgctgctgaaggtgtgaaatacatgcagcaatcagatgttccagattacttgaagcatgtggagatacgattgcaagaagaacatgaaagatgtttgatctacttggatgcaagtactaggaagccattgatagcaacagcagaaaaacaacttcttgaacgtcatatacctgccattcttgataagggctttgcaatgcttatggatgggaatcgtattgaagaccttcagagaatgtactcactcttttcaagggtcaatgccctcgagtcattgaggcaggccattagttcatatatcaggagaactggtcagggcattgttttggacgaggagaaagataaggatatggtttcatcccttttggaatttaaggcttctcttgacacaacatgggaagaaagcttttccaagaatgaagcattctgtaacaccatcaaagattcgtttgagcatctcatcaatcttcgtcagaaccgacctgctgaattgattgccaagtttttggatgagaaacttcgtgcaggtaacaagggcacttcagaagaagagttggagggtacacttgataaagtccttgttttattcaggttcattcagctgcactgtggccaaacttgtagcagacttgacactgtattttatactatcagtatttccataatttccagcatttccataattcctgaagtaaccattttcaaaattcctgttatcattgttaccataatttctgcctcctctatatacataaccagatctgccacctcttcctctggaattagaagatctgcccccatcattgtgttgagtaaactgcacttgagttttagtaatattaaaacttttctttcattaatacagttgaagaccgagtgtggcagccagttcacaaacaaactagaagggatgtttaaggacattgaattatcaaaagaaataaacgagtccttcaaacagtcatcccaggctaggacaaaactcccatccgggattgaaatgagtgttcatgttttgacaactgggtactggccgacgtatccacccatggatgttagacttcctcatgaattgaatgtttaccaggatattttcaaagagttctatctaagtaaatatagtggaaggcgtctgatgtggcaaaattcattaggtcactgtgtcttaaaggcagagtttcctaaagggaaaaaagagttggctgtctccctatttcagactgttgttctgatgttattcaatgatgctgagaaactaagctttcaagatatcaaggactctactggtatagaggacaaggaactgagaaggactctgcaatcacttgcatgtggaaaagttcgtgtcctacaaaagttgccaaagggtagagatgtggaggatgatgactcatttgtttttaatgaagggtttacagctcctctttatcgtataaaggtgaatgcaattcagttgaaggagacagtagaggagaacacaagcaccactgaaagagttttccaagaccgtcaatatcaggttgatgctgctattgtgaggataatgaagactaggaaagtgcttagtcacacgcttcttattactgaactcttccaacagctcaaatttccaataaaaccagctgacttgaagaaaaggatcgaaagcctgattgatagggagtatctggagagagacaagaacaaccctcaaatatacaattaccttgcataatttattttaccttaaaagtttattttcttaaatgacatgggtaaagctagatgtttactcctttgtcatatatgtacagtaacaacagattctccccacccctctatttttcttttcctttcatttatggaccattgtactgtaattgtaaagcatattatcctcccccttgaatttcttttcattagttgagaattcaaaattgttcccaaaagtgatcgagaaattagaaaggaattggtgattaaca

SEQ ID NO: 1575 - DNA, 2472 bp, Brassica oleracea
tgtatccaccttcttctctcccgatatttcatgtctcttccaaccaaacgctctacttgcccgccgatgaagaaagccaaaaacggcctccacgctccttccgccgacaaggttggctttcccatggaggaggaggaggaggaagatcctactccctccgccgccaatctctcccgcaagaaagctactctcccccagccttctaagaagctcgtcatcaagctcaacaaagctaaaccaagtctacctacaaactttgaagacactacctgggataatctccagtcagctatcagagctatattcctcaaacacccctttccttttgacctcgagcggctctaccaggctgttgataacctttgcttgcataagctggaaggaaagctttacaaacggattgagaaggagtgcgaagaacacatctctgtagctttacagtcgttagttgggcaagacaccgatctgtctgttttcttgtcactcgttgagaagtgctggcaagatttctgtgaccagatgctgatgatccgcagtatagccttgtctttggataggaagtatgtgatacagaacccaaatatacgttcattgtgggagatgggcctgcagctttttcggaagcatctttctctgtcccctgatgttgagcagaggactgttactgctctcttaagaatgattgaaaaggaaaggttagccgaagctgttaataggactttactaagccatctcttaaagatgtttactgcactgggaatatatacggagagctttgagaaacatttccttgaatgcacttctgaattttatgctgctgaaggaatgaagtatatgcagcagtatgacgttcctgagtacctgaagcatgtcgagggaaggttgcatgaagagaatgaaagatgcatactatacatagatccatcgaccaggaaacccttgatatcaactattgaaaagcaactccttgagcgtcatacagttgcgatcctggataagggtttcacaccattaatggatggacgtcgtactgaggacctccagaggatgtacaccctgttttctagggtcaatgcacttgagtctttgaggcaggcgcttagttcctacattcggaaaactggacagaagattgttatggatgaagaaaaagataaagatatggtacaatcactattggacttcaaggcttctcttgacatagtatgggaagagagctttcgcaagaatgaatcatttggcaacacaatcaaagattcgtttgagcatctgataaatcttcgccagaatcgtccagctgaacttatcgccaaatttttggacgagaagctccgtgctgggaataagggtacttctgaagaagaattggagagcacccttgaaaaagtcttggttttgttcagatttatccagggtaaagatgtgttcgaagcattctataaaaaggatcttgcaaagagactccttttgggaaagagcgcatcgattgatgctgagaagtccatgatctctaagctcaagactgagtgcggtagccagtttacaaacaagctcgaagggatgtttaaggatattgaattgtcaaaggaaatcaatgagtcattcaaacaatcgtctcaggccagaacaaaactgccatcgggaattgagatgagtgtccacgttttaaccacagggtactggccaacatatccacctatggatgttaaacttcctcatgaattaaatgtctatcaggatatcttcaaagagttctatttgagcaagtacagtggcaggaggttaatgtggcaaaattcactaggtcactgtgttctgaaggcagatttcaccaaagctaaaaaggagcttgctgtttccctttttcaggctgttgttttgatgttatttaacgatgcaatgaaacttagctttgaagacattaaagattccactggcatagaggacaaagaactgagaaggactctacagtcgcttgcctgtggaaaagttcgtatcctgcataagtatccaaagggaagagacgttcaagacggggatgaatttgattttaatgacacctttacagctcctctctatcgcattaaggtgaatgcaatccagatgaaagagactgtagaagagaacacgagtacaacagagagagtattccaggacagacaataccagattgatgcagccattgttcgaattatgaagacaagaaaagtcttaagccacactctcttaatcactgagctcttccaacagctgaaattcccaataaaaccggctgatcttaagaagaggatcgaaagcctgatcgatcgagagtacttggagagggacaagagcaaccctcagatatataattatcttgcttagtaatctcacctctctgctaaacgtcttttcaacattttattttattttattttatttcttactctgtatatttcttcaatctaaaaaaaaaagaactcgagatttcgg

SEQ ID NO: 1576 - DNA, 2584 bp, Flaveria ramosissima
atacaatgagtttttgatccactttcatatgtcgcaaccctcaaacaacaaccgcaaacactcatctacaacctgcacatctccaccaccacaatccacccacacaaccaccggcggcggcggacctcactttccggcgatgaagaaggcgaaatcgcaggctgtatcttgctctttggacaacaaaaacgggtttcaatcgcatcaatttgatagtaattcgtcggtgcaagacccttcgtccatgatcgtagatccgactgataacgatggtggaagagcctcttctgctggtggattcaccgctaatttggctcgtaagaaagctacgcctccgcagcctgctaagaagctcgtaatcaaacttgttaaagctaaaccaaccttgcctacaaacttcgaggagaatacatgggccgtcttgaagtcggcaattaatgccatattcttgaagcagccagattcttgtgatttagagaagctttatcaagcggtcaatgacctttgccttcacaaaatgggaggaagtctttatcaacggattgaaagagaatgtgaatcccacatatcttctgctttacaatcattagttggtcaaagtgaagatcttgtggttttcttatcacttgtgcacaaaacctggcaagatttctgtgaccaaatgttaatgattcggggtatagctttgtatcttgaccgtacatatgtcaaacaaactccatctgtgcgatcattgtgggacatgggccttcaactctttcggaagcatctatcactagcttcagaagttgaacacaaaacagtctttggtcttctgaaaatgatagaaagtgagagattaggtgaagcagttgatagaacacttcttaaccatctgttgaagatgtttactgctttgggcatttattctgagagttttgagaagccattccttgaatgtacattagagttttatgctgctgaaggagtaaaatacatgcaaaactcagatgttccagattatttgaaacatgtggaggtaaggctgcatgaagaacatgacagatgtctgctgtatctggatgctagtacgagaaaaccgttggtagcaactgctgaaaggcaacttcttgagcttcatatatctgcaatacttgataagggtttcacaatgttgatggatggtaaccgaactcaagatcttagaaggatgtattcacttttctccagggttaatgcccttgaatccttaagagttgccctaagttcatacatcagaaaaacagggcaaggaattgtaacagatgaagaaaaggacaaagatatggtgccttccctcttagagtttaaggcttctcttgataaaatatgggaagaaagtttttcaaagaatgatgttttttgcaataccattaaagaagcatttgagcatctaattaatctccgtcagaaccgtcctgctgaattgattgcaaagtttttagatgagaaacttcgtgctggaaataagggtacatcagaggaagaattggagggcactcttgataaagtattggttctgttcagatttatacagggtaaagatgtgttcgaagcattctacaaaaaggatcttgcaaaaagacttcttttagggaagagtgcatctattgatgctgaaaagtcaatgatctccaagttgaaaactgaatgtggtagccagtttaccaacaagcttgaaggaatgtttaaggatatagagttatcaaaagagataaatgaatctttcaagcaatcatctcaagctaggatgaaactaccctcaggaattgagatgagtgttcatgttttaacaactggttactggccaacatatccaccaatggatgttcgccttccccatgaattgaatgtttatcaggacatttttaaagagttctacttgagcaaatatagcggtaggcgattaatgtggcaaaattcattaggtcattgtgtcttgaaagcagaatttgcaaagggaaaaaaagaactggcagtttccttatttcagactgttgtcctgatgttgttcaacgatgcacaaaagcttagttttgaagatattaaagatgctactggcattgaggacaaggaactaaggagaactctgcagtcacttgcttgtggaaaagttcgggtccttcaaaagataccaaaaggtagagatgtggaagataatgatactttcatgttcaatgatggatttactgctcctctttatcgtataaaggttaatgctatccaattgaaggaaactgtggaagaaaatgcaagcactactgaaagagtattccaagatcgtcaatatcaggttgatgctgctattgttcggattatgaagaccaggaaaatgctaagtcatacacttttgataaccgaactctttcagcagctaaagtttcctataaaacctgttgacttgaagaaaaggatagaaagcctgattgaccgggaatacttggagagagataagagcaatcctcagatatataactatttagcatgagcatcaatcaagactactaatggcaggcatggagtttggttctttaacaatttccttgtcagtttatgtaaagaaagt

SEQ ID NO: 1577 - DNA, 2515 bp, Papaver somniferum
aagaaggaaataaaagaagagagatatttgtgtgataccgatgatgcagtagtattaggtctgattgatgtctcaccaaaagcgcccttactctaacaacagtgattcaatctcagcagccatgaaaaaactaaatctcaagctataaattattcgtcaacagcagaaaagaatggaatacgtttcaatgatgatgataacgatgatgaaggttctaatccaatgattctcgaagataatattattaagaatcatgatattcttggcggtgctggtagtagtagtggtggtggtggtggatgtagtcgtgctatagctgcaaatttgtctagaaagaaagcaactcctcctcaacctgctaagaaacttgttattaagcttgttaaagaaaaaccaaagctgccaacaaattttgaagaaaatacatggggaacactgaagtcggctattagtgctatattcctaaagcaaccagacccctgtgactcagaaaagctttatcaggctgtttgcaatctgtgtgagcacaagatgggcggaaatctctataaaaaaatcgagaaggaatgtgaagcacacatttccacggcactgcaaaatttggttggccagagtcctgatttggtggtattcctgtctcttgtggagaaatgttggcaagatctttgcgaccaaatgttaatgattcgtggcatagccttgtatctggacagaacatatgtcaaacaaacaccaaatgtgcgttcattgtgggacatggggctgcagctattttgcaaacatttatctttgttaccagaagttgggcataaaacagtcacgggtcttttaagattgatcgaaagggaaagattaggtgaagctattgacagaactcttgttaatcatctcttgaagatgtttaatgcactaggaatctactcagagagctttgagaaaccatttcttgtggggacatctgaattttatgcttcagaaggtgcaaaatacatgcagcagtcggacgttccagattatcttaagcatgtggagttaaggttgcatgaagagcatgaaagatgcttactatacctggatgctggtacaaggaagccactaatagcaactacggaaagacaacttctcgagcgtcatatatctgcaattctcgataagggtttcacaatgcttatggatgggaatcgcgtcgaggatcttcgaaggatgtatgcgctattttcacgggttaatgcatttgaatccctaagacaggccttgagttcacacatccgtgtttctgggcagaactttgtcatggatgaggagaaagacaaagatttggtctcctctcttctaagttttaaagcgtctctcgatatgatatgggaagaaagtttctctaagaacgaaacattttctaacacaattaaagatgcgtttgaacatctcattaatcttcgtcagaaccgacccgctgagttgattgcaaagtttctggatgagaagcttcgcgctggtaataagggtgcttctgaagaggagttagaaggaatacttgataaaattctggttctattcagatttatacaaggcaaggatgtgtttgaagcattctacaaaaaggatcttgctaagaggctattgttaggaaagagtgcctccatcgatgcagagaagtccatgatttcaaagctgaagaccgaatgtgggagtcagttcacgaataaacttgaaggaatgtttaaggatattgaattatcaaaggagataaatgagtccttcaaacaatcatcccaagctaggacaaaactaccatcgggtattgagttgagcgtccacgtattaacaactgggtactggccaacatatccaccaatggatgtccgacttcctcacgaactgaatgtctatcaggatattttcaaagagttctatctgagcaagtatagcggaaggcgcttgatgtggcagaactcactaggtcattgtgtactcaaggcaaattttccgaagggtaaaaaggagctgtcagtttctctgttccagactgttgttttgatgctgtttaacgatgcccaaaaacttagtttccaagatattaaggattcaacgggtatcgaggataaggagctgagaagaactctgcagtcacttgcttgtggaaaagttcgcgtactccagaagtttcctaaagggagggatgtggaagatggtgattcttttgttttccatgaagagttttccgcacctctataccgcatcaaggtaaatgcaattcagatgaaggagacagtagaagagaacacaagcactactgaaagagtatttcaggatcgtcaatatcaggtcgatgcagctattgttcgtataatgaagacaaggaaagtgctaagccacacactcctgataactgagctcttccagcagctgaaattcccaataaagccagttgatttgaaaaaaaggattgaaagtctcattgacagggagtacctagagagagacaagaataatccccagatatacaactaccttg

SEQ ID NO: 1578 - DNA, 8206 bp, Ricinus communis
ttttttttcttttttttttttgttaatgtctctccccaccaaacgctctgccaccgccaccagctcctcctccaccagcagcgccgccgctaatagttttcctccaatgaagaaagccaagtcacaagctgtatccgcttgctcacctctcgacaccaccactaacaaaaacggtattcaccacttcaatccttccactactgctgccgcggaaaacgatgtcgttttcgacccttcttcaatgatgtctctcgatgacgatcctaaactcgacgacgaccaccaccgctctcatcatcatcatcctcctgccgccgctaatttatctcgcaaaaaagctactcctcctcagcctgcaaaaaagcttgttatcaagcttgttaaagctaaaccaacattacctataaatttcgaggaggatacatgggcaaagctgcagtcagctattaaagctatattcttgaagcaaccagattcctgcgacctggagaagctttatcaagctgtcaatgatctttgtctgcacaagatgggtggaaatctttatcagcaaattgaaaaagaatgtgaagcacatatttctgcagctctacgatctttagttggtcaaagcccagatctggtggtcttcctatcacttgttgagagatgctggcaggatctttgtgatcagatgttgatgattcgtggtatagccttgtatctagatagaacatatgtgaaacaaaccccaaatgtgagatcattatgggacatggggttgcagcttttccgtaaacatctttctctgtctcctgaagtggagcataaaactgttactggccttttgcgaatgattgaaagtgagagattaggtgaagcagttgatagaactctccttaatcatcttttgaagatgtttactgctttaggaatttatgcagaaagctttgagagaccattccttgagtgcacatctgaattttatgctgccgaaggcatgaaatatatgcagcaatcagatgttccagattacttgaaacacgtggagataaggttgcatgaagagcatgaaagatgcttactgtaccttgatgcaagtactagaaagccacttattgcaactgccgaaaggcagctcctagaacgccatatatctgccattctggataaggggttcatgatgctaatggatggccatcgaattgaggaccttaagaggatgtactcattgttctcaagggtcaatgcacttgaatcgttaaggcaggcccttagctcatacatacgaagagctgggcaagccgttgtcatggatgaagaaaaagataaggatatggtatcctctttgttagagtttaaggcttctcttgacacaatatgggaagaaagcttttctaagaatgaagcattttgcaataccataaaggatgcgtttgagcacttaattaatatgcgccagaaccgaccagccgagctgattgcgaagtttctggacgagaaacttcgtgctggaaataagggtacttctgaagaagagttggagggtacacttgataaagttttggttttattcaggtttattcagggcaaggatgtgtttgaagcattttacaagaaggatcttgctaaaagactgctgttgggaaaaagtgcttctattgatgcagagaaatctatgatatctaagctaaaaactgagtgtggaagtcagtttacaaacaaacttgaaggaatgtttaaggatattgagttatcaaaggaaataaacgagtccttcaaacaatcatcccaggcccggacaaaacttccatctggtattgagatgagtgttcatgtcttaacaacagggtactggcctacatatccacccatggacgttaggcttcctcatgagctaaatgtctatcaggatattttcaaagaattctacttaagtaagtatagcggcaggcgcttaatgtggcaaaattcattgggtcactgcgtgttgaaagctgaattttcgaagggtaaaaaggagctggccgtttctctgtttcagactgtcgttttgatgttgttcaatgatgcacaaaagcttagctttcaagatatcaaggacgccacaggcatagaggacaaggaactgaggcgaactttgcaatcgcttgcgtgtggaaaagttcgtgtcctgcaaaagctgccaaaagggagggatgtcgaggatgatgattcatttgtattcaatgagggattcactgctcctctatatcgtataaaggtcaatgcgatccagatgaaggaaactgtagaggagaacacaagcacgactgagagagtatttcaggaccggcaataccaggttgatgctgctattgttcggataatgaagacgaggaaagtcttaagtcacactcttctgattacagagctcttccaacaggcaaagtgttttccactttatttatctcaacagtcaagtacataaatggaatctatatgatatgcgagccacacaaatttattgaagaattggttaaaccgtaatttacacattctctttacaagttgaaaccttaaaaatgatgcaatttaatcaaatacacattctaatccaaggatctcttttatcatgcaattgcacttgcattttatcctggttttcttcttaatttgggaatgaaaataagcatatatgttgttaaaacacaatgaagtgttattatattgaactaatggcgatgaaaaatgcgtttcttattcttgtggtgaacagctcaagtttcccatcaagccagcagatttaaagaagaggatagagagcctcattgaccgggagtacctggagcgggacaagaacaaccctccccccccccccccccccccccccccccccccccccccccccccccccccccccccccccccccccccccccccccccccccccccccccccccccccccccccccccccccccccccccccccccccccccccccccccagcctttctttcatactccctctccctgttgtagactatgagttgctttattaagtgactgtttaaagtgaaaatgattgatagagaaagaaaaaaaaaaagaacaagagtttacaccagttggaggaaagtgaaaatgataggctttgacatgtttatcgccagggaaaatggaaagattatattacaattgatggtgtatgcttttccggtttactccgtgaactgtatgggaactcttgaatcaagttcttatataatatatacaagtgttcccctctcggtggaattgtttagagcttcggtgactcttgtctcttccggcatttcagtctggtgattctcctattcgttagtccttatcttcccccctctcttgtccctattctctcgctatcctcttctgcatttacttctctatttactccatttttctctctcctatttacttcatttatggtggaggaaaactcaattaatgttctagttcaaattgctatggatttgtcaatgaaggatatttcgttgaatctacaaactaatgcctctgccgctcaaggggttactgatgtcactttggtggataaaattattggagaaaagaactacagccctggacttgttcagactattatgcaaagagtttggaatgtttctcaaatgctgaatgtgaaaaagagagaaacacattcctcttctggttcactcattgtggggagaaaagaaagtatcaccagcttctggattcaaatccatggtttaccccttaatcagatgacactcgaaaatgccaaaatgattggtggattatttgaagggcttgaagaggtagacctcactcctgacaatcaaatctgctggaatagttatatgcgtctgaaggtggctgtgcgagtcgataaaccactgttggaaggcttcagtaatattcaagatgtggtattcttggccattctcaaggctcttgcccaaatgggaagaaaatggacgaggttaaggaaaaatagggaagaagacaattctatgttaaccgttgaggatcgccaaaaggagccacctaaacctaacaccatgatgaaatcgggtatggctgcaagttcagttccttctaagtttcaacttcctaaaatctttaacaaattaagcaacccacccctgcctggcatatatcctaagggcaatatgcaaaactgctcctcgatactcgagggccctcttgaggctccaactcacctaagaagaagaattagaattgagaatttagctagagggttcagagacactaactctccatcttttgaagttctagttgatgtgaatggctcccagaatccaaactcggaagaggcggtggtgggtggcctacagccacgcgggaatgggacaaaccctaacaatccaaaacctgagggcactcaggtcgaaacattgtcccaatctgatctttctttcagaaacgaaacaaagggtttggcaggtggtctaggattatggtggatgtctgatgttacagttcaggtattgggaagctgtgaatacttcattgatacagtgattgagggcgaacacgtttgccacgccacttttgtctatagggaactgaatagaagtagaagaaacttattttgggcagagcttaggaaaattaagtctgcagattcaaacccatgggtatgtattggggattttaacgccttaagaaggactatcgataaaaggggaagaaggcctgttatgcctgctgattgttgtgagttccagctgtttatggaggaatgtgatcttaaggatatggcgtttaagggacattggtttacttggagtaacaagtaaccaggagaagataatgtagttgcgacactagatagggttgtgtataactggagatggaaagatatctttcctcagagtcagcttatacatgaggagctgctaggatcagaccactaccccctcgtgttacacttagtgtataaaagcaaagggcgaaggatggcgttcaagtttgaatcgaaatgggtgtctgatgaaagttgttgagaagtgtttcggaagcatggtgaaaccatgtccagggtttaaatttattcaaagttgctaagaagcttaaagagaataaagctgctctaatccaatagaagaggcggtgtaattggaatgggaaagaacgtatagattacctctccaagcaactagataatcttatcagtggcctagtagaggagtactcgaaagagaaagaacaagagctgaaaaaggagttaagccatgcgtggaaagttgaggaaatgtattgccaataatcacgtgttaagtggctgctctatggtgacaaaaataccacattctttcatcaaagtgcaatcagatgcaggcagagtaaccaaattgtgaaagtgatatgaatgatgcaaggcaatgggtggataaagaagaacatatctacaaacactttgaggagcactatcctatggtcaacctacaaaatagtatccttgattgtatttctccttgcatatctaatgatatcaatgttgttttgtgtacccctctttgtaatgatgaaatcaaaaaggctgcttttgagatgggttctatgaaagccctagagcctgacaggtttccaggtttcttctaccagaaactctggaatattgttggcccagatgtgattttgggtaccaagcaattttttaggactggttttatgcttagagagctgaattgtactaacacagtgcttattcctaagaaatgtaaccctatatctgtcaagggctatcatccaataagcctctataactttgtttataaagtgatttttaaagtattagtgaacaggttgaagccttggctgccagaattactgtctccatatcaaatagctttgtgctaggaagactcatataggaaaacatcattctggcgcaccaagttatgcatgatcttcataaccaacgcagaggaaaaagatataacatggcagtgaaattggatctccaaaaagcttatgactgggttgattggtccttcctgagagaggtgcttagtcgaatggatattaatggtcattgggtggcgatgcttatgcaatgtgtaatgacagtccaatagtcccttgtaattaatggtacaaagttgcagaccttcaccccgactagagggcttaggcagggggacccgttgtcctcctacctctttatttttgtttctgatgtactgttaaagaaattagagcaggagattgatgaaggcaggttatctgggtatagaatcaagcctcaatgttcaactctctcgcatgccctgtttgcggacaacacgatgctctttgccaaaacatcgattcaggaggctagtgctttgagaaaagtcttatctgattattgcgagccttctggacaacttgtcaattgggggagatcaaatgtagtctttagctctaacactccttggcatctccgagatgatatcagcagtatccttagagttcacatctcagggtcaggaggagcttacctaggattgccgtcttagcaaggaaggtcgaaaacacaggttttatctttcctcaaggatcgtgtggccaaaaaaaaaaataagaattggaaaagccagctcttatctcaagtgggaaaagagattatgataaaagccgtgctccaatcactgccaaattatgttatgaatctgtttaagcttccactttctatttgttcagatctcggaaaatcctttgccaaattctggtggaactcgcttgataataagagaagaattcattgggtgagctggcgaaaaatgtctatagctaaagttgatgaaggcctggggttgaaggacttaaccatagctgaagagtgctgcaaaaccctagtgctttatgggttagagtcctcaaagggatatacttccctaggacaggatttttggaggcttgtagggggatggctgattcttggtgctggagtgtggattccagatgtgcaggagtttaaagtttcctctatgccgccaacaaatgggggtccaacaagagtgcagagcttattgattggcgtcgtagagcttggaatgtgcccctaatggaacaattcctgaatcaggaagatattagtgctatattcgaatcggtgcgaggcacctccctgataggctcatctagttcccagataaaagagatattttttccatcaagtcttgttataatctcttggctaactctcgtcctcagaatttagaccattctccttcaaatgccatccacactgataaactggtttggaaatcaatctagaaactcaaagtcaatcctagagttaaaactttcatgtggcgtgcagtctgcaatgctctcccatctttagcagccttgaagcacatgaaatgcattagctcggatatgtgcttgttgtgtgggaagagtaatgagactatagagcacctcttatttttttgtgatcaagcaactgctacgtggtttgctagccctttgcagtatagacccattccaattgggtttggtagtatgcaagattggtagtgcaagatggtggaatttgacaaagaagataaagctgataatttattatccgttgtagcaaacacttgctggtattatttggaaaagtagaaacgattttgtgtttgaaaagcaagttccaaatccaatctggaatgtgtctagagctcaagagtgtatgaaagagtcgaaaagtccacaaattactgaaagtgtcggtgagggaatgaatgtgaatcactatgcagttcttgcaagtaattaggctcctcccccactgaattacatcaacattaactgtgatgtttcctttatcaaggaaggttgtatgacaggatatagtgttgtgtgccgtgatcataggggggggaaatgttgatggttgtgttggaaggcaagtgttgagttcggtcctacagggggaaacgagagctttaatggaagccatgctttttgctgcgtccagaaaatttgcacaggccatcttcgagactgactctcttatgctagtgcaatccattgagagcagtgacgtggagatcatttgggcaattgaagccgatgtactctttattaaatctttactgctattcaactcctcctggagtattttgtacatcagtagaattgctaattctgttgcgggttggctggccaaacaagctaggctaaatgtctgtcctgttccgtggcaaaccaatcccccagtagcattgt

SEQ ID NO: 1579 - DNA, 2913 bp, Cocos nucifera
ttttctctcttgctctcggttccatccccccattcctctcctgttcctctgccctcatctcccctctcccccgatctccgccttcgagctctctccctcccactctcttccccgtgctcgaatcctcgccatgcacttttacgattgattgatgactcgtgcaaagcggcccctctccagcgttagcagcagcggcggcggcaggaccaccacccacagcacctcctccggcggagtcattggaagccccgtctccccatccgccacctcctcttctgccatgaagaagttcaagtcccagccgcccgccgccgctactgtcgagagggagaagaacggcctccatccccacagcgcccacttcgaccccgcggcggcggccgcccaacccgccgaggaggaggaccccatgctcgtagaccaggaggacctcaaggctggcgcatccgctgccatcacctccaccggcgtcgctgccaacctctccaggaagaaggctacccctcctcagccgttggccaagaagcagctcgtcatcaagctcgttaaagggaagccgactctgccaacaaattttgaagaggatacatgggcaacattgaagtctgctattacagctatatttttgaagcagccagatccatgcgactctgaaaagctttatcaggctgtgagtgatctttgcctacacaagatgggaggaaatctttatcaacgtatacagaaggaatgtgaagtacatgtttcggcaacactatcctcattggttggccagagccctgacttggttgtatttttatcattggtagaaaaatgctggcaggatttttgtgaccagatgttgatgatacgtggtatagcattatatcttgatagaacttatgtcaagcaaaccccaaatgttcggtcattgtgggacatggggttgcagttgtttcggaagcatctctctttatgttctgaagttgaacataagattgtcactggtcttctgaggttaattgagagggaaagactaggtgaagctattgataggacagtacttagtcatcttttaaagatgtttacagctcttggaatttacacagaaagctttgaaaagccctttctggaatgcacttctgagttttacgctgctgaaggtgtgaaatatatgcaacaatcagatgtcccagactatttgaagcatgtggagtcaaggctacatgaggaacatgaaagatgcttgctctacttagatgcaaatacgaggaagccccttgtagcaactgctgaaaagcaactccttgaacgacacacatctgcaattcttgacaagggatttacaatgctcatggaagctaatcgagtccaggaccttcagagaatgtacatgctctttcagagggttaatgctctggagttgttaagacaagctcttagctcatatgttcggggttctgggcaaggtattattatggatgaagagaaagacaaagatttggtttcctatctcttagagtttaaagcatctcttgatacaatttgggaagaaagtttcttcagacatgaagctttttcaaatactataaaggattcatttgagcatctcattaaccttcgtcagaataggccagctgaactgatcgcaaaatttctggatgagaagcttcgtgctggcaacaagggtacatctgaagaagagttggagggtacacttgataaagtgttggttttgtttaggtttattcaaggaaaagatgtctttgaggcattctataaaaaggatcttgcaaaaagattattgttgggaaaaagtgcatcaattgatgccgaaaagtcaatgatttctaagctcaaaactgagtgtggaagtcaattcacgaataaacttgaaggaatgttcaaggacattgagttatcgaaagagattaatgattcctttaagcaatcatctcaagctaggacaaaacttccaactggtattgaaatgagcgttcatgtccttacgactgggtattggccaacatatcctcctatggatgttcggcttccacatgaactgaatgtttatcaggatatatttaaggagttctatttgagtaagtacagtgggaggcgcttgatgtggcaaaattcattaggtcaatgtgttttaaaagcagaatttccaaaaggtaaaaaggaattggcagtgtcattgttccagactgttgtattaatgctgttcaatgacgctcaaaagctcagtttccaagatattaaggactcaactggcattgatgataaagagctgagaaggactttgcagtcacttgcatgtggcaaagtccgagttctccaaaagatccctaaaggaagggaagtagaggatgatgactcatttgtatttaatgaagaattcagtgctcctctctaccgcattaaggtaaatgcgattcaaatgaaggagacggtggaagagaacaccagcaccactgaaagagtattccaagaccgtcaatatcaggttgatgcggctattgtccgtatcatgaagacaagaaaagtactaagccacacgcttctaataactgagctctttcagcagctcaaatttcctataaaaccagcagacttgaagaaaaggatagagagcctcattgacagggaatacctggagcgggccaagaacaatcctcagatctacaattacctggcttgacccccttggcaccctaaagttacctcttctggcagcaaatcagggagttgcctccctcccagtgtcatgcatgcttggggggctggttttagcaatctcttgatgtcaaccatgtacaggagactctagccatctttttctttttgttccaagtaacacctcggtactgtaaaatatcaagttccacttctctttcttcatcttgttgtggaattaatcatttataattt

SEQ ID NO: 1580 - DNA, 2794 bp, Elaeis guineensis
aatcctcgccatgcgcttcgtggattgattgatgactcacgcaaagcggcccttctccagcggcagcagcggcggcggcagcaccacccacggcagcagctcatccggcggactcatcggaagccccctctccccctccgccaccacctcctcctccatgaagaaggccaagtgccagccggccgccgccgccgccgccgccgccgtctccgtcgagagggagaagaatggtctccatgtccatcccacccgctacgaccctgccgccgcccagtccgccgaggaggaggattccatgctcttggaccaggaggaccttaaggcgggcgcatccactgccatcacgaccaccggcgtcgccgccaacctctccaggaagaaggccacccctcctcagccgtcgactaagaagcagctagtgatcaagctcgttaaaggtaagccaactctgccaacaaattttgaagaggatacatgggcaacattgaagtctgctattacagctatatttttgaagcagccagatccatgcgactctgaaaagctttatcaggctgtcagtgatctttgcctacacaagatgggaggaaatctttatcaacgtatccagaaggaatgtgaagtacatatttcggcaacactatcctcattggttggccagagccctgacttggttgtatttttatcattggtagaaaaatgctggcaggatttttgtgaccagatcttgatgatacgtggtatagccttatatcttgatagaacttatgtcaagcaaaccccaaatgttcggtcattgtgggacatggggttgcaattgtttcggaagcatctctctttatgttctgaagttgaacataagattgtcactggccttttgaggttaattgagagggaaagattaggtgaagctatcgataggacactgctcagtcatcttttaaagatgttcacggctcttggaatttacacagagagctttgaaaagccctttctggaatgcacttctgagttttatgctgctgaaggtgtgaaatatatgcaacaatcagatgttccagactatttgaagcatgtggagtcaaggctacatgaggaacatgaaagatgcttgctctacttagatgcaaatacgaggaagccccttgtagcaactgctgaaaagcaactccttgagcgacacacatctgcaattcttgacaagggatttacaatgctcatggaagcaaatcgagtcaacgaccttcagagaatgtacatgctctttcagagggttaatgctctggagttgttaagacaagctcttagctcgtatgttcggggttctgggcaaggtattattatggatgaagagaaagacaaagatttggtttcctatctcttagagtttaaagcatctcttgatacaatttgggaagaaagtttcttcagaaatgaagctttttcaaatactataaaggattcatttgagcatctcattaaccttcgtcagaataggccagctgaactgatcgcaaaatttctggatgagaagcttcgtgctggcaacaagggtacatctgaagaagaattagagggtacacttgataaagtgttggttttgtttaggtttattcaaggaaaagatgtctttgaggcattctataaaaaggatcttgcaaaaagattattgttgggaaaaagtgcatcaattgatgctgaaaagtcaatgatatctaagctcaaaactgagtgtggaagtcaattcacaaataaacttgaaggaatgttcaaggacattgagttatcgaaagagattaatgattcgtttaagcaatcatctcaagccaggacaaaacttccaactggtattgaaatgagtgttcatgtccttacgactgggtattggccaacatatccccctatggatgttcggcttccacatgaactgaatgtttatcaggatatatttaaggagttctatttgagtaagtacagtgggaggcgcttaatgtggcaaaattcattaggtcaatgtgttttaaaagcagaatttccaaaaggtaaaaaggaattggcggtgtcattgttccagactgttgtattgatgctgttcaatgacactcaaaagctcagtttccaagatattaaggactcaactggcattgacgataaagagctgagaaggactttgcagtcacttgcatgtggcaaagtccgagttctccaaaagatcccaaaaggaagggaagtagaggatgatgactcatttgtatttaatgaagaattcagtgctcctctctaccgcattaaggtaaatgcaattcaaatgaaggagacggtggaagagaacaccagcaccactgaaagagtattccaagaccgtcaatatcaggttgatgcggctattgtccgtatcatgaagacaagaaaagtactaagccacacgcttctaataactgagctctttcagcagctcaaatttcctataaaaccagcagacttgaagaaaaggatagagagcctcatcgacagggaatacctggagcgggacaagaacaatcctcagatctacaattacctggcttgaccccctttgcaccctaaagtaacctcttctggcagcaaattagtcccaaggtcatgcatgcttggggggctggttttagcaatctcttgatgtcaaccatgtacaggaaactctagccatctttttctttttgttccaaataacacctccgtactgtaaagtatcaagttccacttccgtttcttcatcttgttgtggaattaatcaattataattttttgtttt

SEQ ID NO: 1581 - DNA, 2653 bp, Chrysanthemum coronarium
tttataaactttttatttcatatgtcttcacatcatcaacaaccttcaagcaccaccaccaacaaccgcaagcgcacatcctcctccgccgcctccgcctccgtaacgccaccgtcgtcaatcatgaaaaaagctaaatcacaagtcggctcttcatcttcttcatcctcacactcgttcgataacaaaaacggattccagtatcagattgagaatactaatactaatagtggtgacgctatggttgaagatccggttgagatgacgtcatctggatatgcggctaatttggctaggaagaaggctactgtgccggttcctaataagaagcttgttattaagcttaaaggcaagccggccatgccgacaaacttggaggaggatagatggacagtcttgaagtctgcgattagtgccatatttttgaagcagccaggatcttgtgacttggagaaactttatcaagccgtcaatgatctttgcctctggaagatgggaggaagtctttaccaacggattgagagggagtgtgaagcccacatatctggtgctttacaatctttggttggtcaaagtgaagatcttgtggttttcttatcacttgtgcagaaaacctggcaagatttttgtgatcaaatgttgatgatacgtagtatagccttgtttcttgaccgtacgtatgtgaaacaatctccaaatgtgaaatcgttatgggacatgggccttcaaccttttcgtaagcatttgtcattagcttcagaagttgagcacaagacagtatttggccttctgaaaatgatagagactgagagattaggcgaaacagttgatagaacacttctgagccatctcttgaggatgttcactgccttgggcatttactccgagagttttgagaagccattccttgaatgtacatcggagttctatgctgctgaaggagtacgatacatgcaaaactcagatgttccagattatttgaaacatgtcgaggtaaggttacatgaagaacacgatcgatgtctactctatctggatgatcacacaaggaaaccacttgtagcaaccgctgaaaggcaacttcttgagctccatattaccgctatacttgataagggtttcacaatgttgatggacggtaatcgaactcaagatcttaaacggatgtatacacttttctctagagtaggtgccattgaatccttacggcaggcccttagctcatatatccgaaaaacggggcagagcatagtaacagatgaagaaaaggaaaaagatatggtgtcctcgcttttagagttcaagttgtctcttgataaaatatgggaagatagcttctcgaagaatgatgtttttagcaacacaataaaagaggcatttgagcatctaattaatctccgccagaaccgtcctgctgagctgattgcaaaatttttggatgagaaacttcgtgctgggaacaaaggtacatcagaggaagaattggagggaactcttgataaagtcctggtcttattcagatttatacagggtaaggatgtatttgaagcattctataagaaggatcttgcaaaaaggcttcttctgggaaagagtgcatctattgatgctgaaaagtctatgatctctaagttgaaaaccgaatgcggtagccagttcaccaacaagcttgagggaatgtttaaggacatagagctatccaaggagataaacgagtctttcaggcaatcatctcaagctaggacaaagctcccttcaggaatcgagctgagtgtccacgtcttaacaactgggtactggccaacctatccaccaatggatgtccgccttccccatgaactgaacgtttatcaggacatttttaaagagttctacttgagcaaatacagtggtaggcgactaatgtggcaaaattcattaggccactgtgtcttgaaagcagaatttccgaaaggcaaaaaggaactggcagtatccttatttcagactgttgttctgatgctgttcaacgatgcacaaaaacttagtcttcaagatatcagggatgctacaagcattgaggacaaggaactgaggagaactttgcagtctcttgcttgtggaaaagtccgtgtccttcaaaagattccgaaaggcagggaagtggatgataatgattcttttgagttcaatgatgcattcacggctcctctttatcgtataaaggttaatgcgatccagttaaaggaaactgtggaagaaaatgcaagcactaccgagagagtattccaagatcgtcagtatcaggttgatgctgctattgtccggattatgaaaactaggaaaactttgagtcacacgcttctgataaccgaactatttcagcagctcaagtttcctataaaaccagttgacttgaagaagaggattgaaagcctgattgatagggaatacttggagagagacaagagcaatcctcagatctacaactacctagcgtaaacatcagctccaacaagtctacttgtacacggcatcgggattggatctttcacagtttccttgtctgtttatgtaaagtgatagcttttgttttcattgtaaagcctaattgtttaagcttctattgtagtattgttaaattaaatacttttattactcttacatacacaac

SEQ ID NO: 1582 - DNA, 2604 bp, Eutrema parvulum
tccattttctcggtctaatttcgcgtaggtctgagagagagagagcacagtggttttctttgaaagggttaaaggcttaattgggacatgctttcttcttcttcttcttcgtcttgaattcacctccgatttttcatgtctcttccaacaaaacggtctacttgctccgccgcttcttctgcctccgccgactcttctttctcttccccgccgatgaaaaaggccaaaaacggcctccacactccttcctcgcagcctaaccccgccgacaaggttggctttcccatggaggaagatccaactcccgccgccgcgaatctctcccgcaagaaagctacactgccgcagcctactaagaagctcgtcatcaagctcaataaagccaaaccaagtctaccaacaaactttgaagatactacctgggaaaatctgcagtcagctatcagagctatattcctgaaaaaaccgttttcttttgacctcgagaggctttaccaggctgttgataacctttgcttgcataagctggaaggaaagctttacgaacggattgagaaggagtgtgaagaacacatctctgcagctttacaatctttagttgggcaagacaccgatctgtctgttttcttgtcacttgtagagaaatgctggcaagatttctgtgatcagatgctgatgatccgtagtatagcattgtctctggataggaagtatgtaatacaaaacccaaatgtacgttcattatgggagatgggcctgcagctttttcggaagcatctttctctgtcccctgaagttgagcagaggacagttactgctctcttaagaatgattgaaaaggaaaggttatccgaagctgttaataggactttactaagccatcttctaaagatgtttactgcactgggaatatatacggaaagctttgagaaacatttcctcgaatgcacttctgaattttatgccgctgaaggaatgaaatacatgcagcagtatgatgttcccgagtacctgaagcatgtcgaggaaaggttgcatgaagagaatgaaagaggcatactgtacatagatgcatcaaccaggaaaccattgatatcaactattgaaaagcaactactcgagcgtcatatacttgctattcttgataagggtttcacatcattaatggatggacgtcgtactgaggacctccagaggatgtacaccctgttttctagggtcaatgcacttgagtctctgaggcaggcgctaagttcctacattcggaaaactgggcagaagattgttatggatgaagagaaagataaagatatggtacaatcgctattggacttcaaggcttctcttgacatagtatgggaagagagctttagcaagaatgaatcatttggcaacaccatcaaagattcgtttgagcatctgataaatcttcgccagaatcgtccagctgaacttatcgccaaatttttggatgagaagcttcgtgctgggaataagggtacttctgaagaagaattggagagtacccttgagaaagtcttggttttgttcagatttatccagggtaaagatgtgttcgaagcattctataaaaaagatcttgcaaagagactcctgttgggaaagagcgcttcaattgatgctgagaaatccatgatctctaagctcaagactgagtgtggtagccagtttacgaacaagctcgaagggatgttcaaggatattgaattgtcaaaggaaatcaatgagtcattcaaacagtcatctcaggccagaacaaaactgccatcgggaattgagatgaatgtccacgttttaacaacagggtactggccaacatatccacctatggatgttaaacttcctcatgaattaaatgtctatcaggatatcttcaaagagttctatttgagcaagtacagtggtagaaggttaatgtggcaaaattcattaggtcactgtgttttgaaggcagatttcgccagaggtaaaaaggagcttgctgtttccctgtttcaggctgttgtgttgatgttatttaacgatgcaacaaaacttagctttgaagatattaaagattccactggcatagaggacaaggaactgagaaggactctgcagtcgcttgcttgtggcaaagttcgtgtcttgcagaagtatccaaagggaagagacatacatgacgcggatgaatttgattttaacgacacctttacagcttctctgtatcgcattaaggtgaatgcaatccagatgaaagagacagtagaagaaaacacgagtacaacagagagagtattccaggaccgacaataccagattgatgcagccattgttcgaatcatgaagacgagaaaagtcttgagccatactcttctaatcactgagctattccaacagctaaaattcccaataaaaccggctgatctgaagaagaggatcgaaagtctgatcgatcgagaatacttggagagggacaagaacaaccctcagatatataattatcttgcttagaaatctctctcttttaaacgccttttcaacatttttatttcttctctgtatatttattcacttacaatggccgacattttcttcttcaat

SEQ ID NO: 1583 - DNA, 2479 bp, Solanum lycopersicum
aacctttcactcatttttcttttcttaaagcgaaacctacgttgccgacaaactttgaggaaaatacttgggcaactctaaagtcagctattagtgcgatattcttgaagcagcctgatccatgtgatttagaaaagctttatcaggctgtaaatgacctttgtctgcacaaaatgggaggaaatctatatcaacgaattgaaaaagagtgtgaatcacacatagctgcagctctacgttctttagttggccaaagtgaagatcttgtagttttcttgtcgcttgttgagaggtgttggcaggatttttgtgatcagatgttgatgattcgtggaatagctttgtatcttgatagaacatatgtgaaacaaaccccaaatgtgcgttcactgtgggacatgggcttgcagcttttccgcaagcatctctctcttgcctcagaagtagaacacaaaactgtttttggcctcctacagatgattgagaccgaaagattaggtgaggcagttgatcgaactctgcttaaccatcttttgaagatgttcactgccttggggatttatgctgaaagttttgaaaagccatttcttgagcgtacttctgagttttatgctgctgaaggtgtcaaatacatgcagcagtcagatgttccagattacctgaagcatgtggaggtaaggttacatgaagaacatgacaggtgtttactctacctggacgcaagtactagaaaaccactgatagcaactgcagagaggcaacttttagaacaacacatttctgcaattcttgataagggtttcacagtgttgatggatggtaatcgtattgaagatctccaaaggatgtatatgctattttgcagggtcaatgatctcgaatctttaaggcaagcacttagctcatatatccgaagaactggtcagagcattgtgctagatgaagagaaagacaaagatatggtacccagcctcttggaatttaaggcatctcttgataccatatgggaagaaagcttttttaagaatgaagcttttagtaacactatcaaggatgcatttgagcatctcataaacatccgccagaatcgacctgctgagctgattgctaagtttttggacgagaagcttcgtgctggcaataaaggtacatcagaggaggaattggaggggacattagataaagtcctggttttgttcaggtttatacagggtaaggatgtatttgaagcattctacaagaaggatcttgcaaaaagactgttgttgggtaagagtgcgtcaattgatgctgaaaagtccatgatttctaagttgaagaccgagtgtggcagccagttcaccaacaaattggaaggaatgttcaaggacattgaattatcaaaagagataaatgaatccttcaagcaatcttcccaagccagaacaaagctcccaacagggattgagatgagtgtccacgttctgacaatggggtactggccgacctatccccccatggatgttcgacttccccacgaactcaatgtctatcaggatattttcaaagagttctacttaagcaagtacagtggtaggcgtttgatgtggcaaaattcattgggccactgcgttctgaaagctgaatatccaaaaggaaaaaaggagctcgcagtttctcttttccagactgttgttttgatgctctttaatgatgcggaaaatcttagcttccaagatatcaaggaagcaactggaattgaggataaagagctgagaaggactctacagtctcttgcatgtggaaaagttcgtgttctccagaagattccaaaaggaagagatgtggaggatgatgatacctttgtgtttaatgatcaatttactgctccactatatcgtataaaggtaaatgccatccagatgaaggaaacagttgaggagaacacaagcactactgagagagtatttcaggaccggcagtaccaggttgatgctgctattgttaggataatgaagaccagaaaagtgctgagtcataccctcttaataactgaactctttcagcagcttaaattcccaataaaaccagctgatctgaagaaaaggattgaaagcctcatagatagggagtacctggaacgggacaaaaacaatcctcaaatatacaactaccttgcttagaatgttcccagacatctatattttttttttccatgtaaatgactcgggagacttccttgtcagcttctgtacagttgactttgtaaccattaattttgttgtcatatacattgtagagtttatatttaagtttatctcgtgtgtctactttttaatttttttttttcttcttttgtctacttttttttttcttgaactatatgagcaagttcctcttcattttgttttcacttcatctcgagtaataactttactgtcgatatcacgtgctttaacgcccgtttggaaagatatcttaataattggatggattaatt

SEQ ID NO: 1584 - DNA, 2756 bp, Chrysanthemum coronarium
cttgccctcaagcgttgtgtacgtaaagagcaacaaaggtgtttaaaaatactacaatagaagcttaaacaattaggctttacaatggaaacaaaagctatcactttacataaacagacaaagaaactgtgaaacatccaatcccgatgtcgtatacaagtagacttgttggagctgatgtttacgctaggtaattgtagatctgaggattgctcttgtctctctccaagtattccctgtcaatcaggctttcaatcctcttcttcaagtcaactggttttataggaaacttgagctgctgaaagagttcggttatcagaagcgtgtgactcaaggttttcctagttttcataatccggacaatagcagcatcaacctgatactgacgatcttggaatactctctcggtagtgcttgcgttttcttccacagtttcctttaactggatagcattaacctttatacgataaagaggggccgtgaatgtatcattgaacataaaagaatcattatcatccacttccctgcctttcggaagcttttgaagaacccggacttttccacaagcaagggactgcaaagttctcctcagttccttgtcctcgatgcttgtagcatccttgatatcttgaagactaagtgtttgtgcgtcgttgaacagcatcagaacaacggtctggaacaaggatactgccagctcctttttgcctttcggaaaatttgctttcaagacacagtgacctaatgaattttgccacattagtcgcctaccactgtatttgctcaagtagaactctttaaaaatttcctgataaacattcagttcatggggaaggcggacatccattggtggataggttggccagtacccagttgttaagacgtggacactcagctcgattcctgaagggagctttgtcctagcttgagatgattgcctgaaagactcgtttatctccttggatagctctatgtccttaaacattccctcaagcttgttggtgaactggctaccgcattcggttttcaacttagagatcatagacttttcagcatcaatagatgcactctttcccagaagaagcctttttgcaagatccttcttatagaatgcttcaaatacatccttaccctgtataaatctgaataagaccaggactttatcaagagttccctccaattcttcctctgatgtacctttgttcccagcacgaagtttctcatccaaaaattttgcaatcagctcagcaggacggttctggcggagattaattagatgctcaaatgcctcttttattgtgttgctaaaaacatcattcttcgagaagctatcttcccatattttatcaagagacaacttgaactctaaaagcgaggacaccatatctttttccttttcttcatctgttactatgctctgccccgtttttcggatatatgagctaagggcctgccgtaaggattcaatggcacctactctagagaaaagtgtatacatccgtttaagatcttgagttcgattaccgtccatcaacattgtgaaacccttatcaagtatagcggtaatatggagctcaagaagttgcctttcagcggttgctacaagtggtttccttgtgtgatcatccagatagagtagacatcgatcgtgttcttcatgtaaccttacctcgacatgtttcaaataatctggaacatctgagttttgcatgtatcgtactccttcagcagcatagaactccgatgtacattcaaggaatggcttctcaaaactctcggagtaaatgcccaaggcagtgaacatcctcaagagatggctcagaagtgttctatcaactgtttcgcctaatctctcagtctctatcattttcagaaggccaaatactgtcttgtgctcaacttctgaagctaatgacaaatgcttacgaaaaagttgaaggcccatgtcccataacgatttcacatttggagattgtttcacatacgtacggtcaagaaacaaggctatactacgtatcatcaacatttgatcacaaaaatcttgccaggttttctgcacaagtgataagaaaaccacaagatcttcactttgaccaaccaaagattgtaaagcaccagatatgtgggcttcacactccctctcaatccgttggtaaagacttccccccatcttccagaggcaaagatcgttgacggcttgataaagcttctccaagtcacaagagcctggctgcttcaaaaatatggcactaattgcggacttcaagactgcccatctatcctcctccaagtttgtcggcatggccggctttcctttaagcttaataacaagcttcttattactaggcgccggaacagtagccttcttcctagccaaattagcagcataaccagaagacgaagatgacgtcatctgaacagccggatcttcaatcatagggtcagtatcattcatgttattcatattctgatactgaaatccgtttttgttatcaaacgagtgcgaattagaagatgatgatttggcttttttcataaagtttgttgttggggttacggaggatgatgacgtgttgctgcgtttgcgattggatgaagaatgttgttgcgaagaagaagacatatgataattagagactcataaataaataaattaggatttgattttctgcaggcgatgagagtgtttgtttggtgttgttgatggtgtgtgtttggatggtatctgctactcggataaccgtagtaattctaga

SEQ ID NO: 1585 - DNA, 2785 bp, Cichorium intybus
ctccaacaacaaccgtaagcgctcatctaccacctgtacatctccaccaccatctacccccacagccggcggcgaaagcggcggcggaggagctcacttcttgacgatgaagaaggccaaatcacaggccgtatcttgctctctggacaacaaaaacggcttccagcaacatcaatttgataataattcatctgccgaaccttcatccatgatcgaagatcccactgaaaacgatgctggtcgcgcatcctctgctgggggattcaccgccaatttggctcgtaaaaaagcaacgcctcctcaacctgctaagaagctcgtaatcaagctagtcaaagccaagccaactttaccaacaaactttgaggagaacacatgggcagtcttgaagtcagcaattagtgccatattcttgaagcaaccagacccttgtgatttagaaaagctttatcaggctgtgaatgatctttgtctccacaaaatggggggaagtctttatcaaaggattgagagggaatgtgaagctcatatatctgctgctttacaatcattggttggtcaaagtgaagatctggtggtgtttttatcacttgtgcagaaaacatggcaagatttttgtgatcaaatgttgatgatacgtggtatagcattgtatcttgaccgtacatatgtgaaacaaactccaactgtacgatctttatgggacatggggcttcaattgttccggaagcatttgtcactagcttcagaagttgaacataaaactgtattcggccttttgaaaatgatagagagtgagagattgggtgaagcagttgatagaacactccttaaccatcttttgaagatgttcactgcattgggaatttactctgagagctttgaaaagcctttccttgattgtacatcagaattctatgctgctgaaggtgtaaaatacatgcagtactcagatgttccagattatttaaaacatgtggaggtaaggttgcatgaagaacatgacagatgtctactctatcttgatgccagtacaagaaaaccattagtagcaactgctgaaaagcaacttcttgagctccatatttctgcaatacttgataagggttttacaatgttgatggatggtaaccgaactcaagatcttagaagaatgtatacacttttacaaagggtaaatgcccttgaatccttaagacaagctcttagctcatacatcagaaaaacagggcaaggaattgtgacagatgaagaaaaagacaaagacatggtgtcctcccttttggatttcaaaatgtcacttgataaaatatgggaagatagtttttcaaagaatgatgtttttagtaacacaattaaagaggcctttgaacatctcattaatctccgccagaaccgtcctgctgagttaattgcaaagtttttggatgaaaagcttcgtgctggaaataagggtacatctgaggaagaattggagggcactcttgataaagtcttggttctttttagatttatacagggcaaggatgtgtttgaagcattctacaaaaaggatcttgcaaaaagacttcttttgggaaagagtgcatctattgatgcagaaaagtctatgatctccaagttgaaaaccgaatgtggtagccagttcaccaacaagcttgaaggaatgttcaaggacatagagttatcaaaggagataaatgaatctttcaaacaatcatctcaagctaggacgaaactaccctcaggaatcgagctgagtgtccatgtcttaacaactgggtattggccaacatatccaccaatggatgtccgccttccccatgaactcaatgtttatcaggacatattcaaagagttctatttgagcaaatacaatggaaggcgattaatgtggcaaaattcattaggtcactgtgtcttgaaagcagaatttccaaagggcaaaaaagagcttgcagtttccttatttcagacagttgttttgatgctgttcaatgatgcacaaaagcttagcttccaagacattaaggatgctacaagcattgaggacaaagaactaaggagaactctccagtcccttgcttgcggaaaagtccgtgtcctccaaaagattccaaaagggagggaagtcgatgacaatgattccttcatgttcaatgatgtattcactgctcctctttatcgtataaaggttaatgctatccagttgaaggaaactgtagaagaaaacgcaagcaccacagaaagagtattccaagaccgtcaatatcaggttgatgctgctattgttaggattatgaagactaggaaagttctgagtcacacacttctgataaccgaactctttcagcagctgaagtttcctataaaaccggttgacttgaagaagaggatcgaaagcctgattgaccgggaatatttagagagagacaagagcaaccctcagatatacaattatctagcatgaagaaatgaagggtgtttgtttttatggaggataaaatttccttttgtctgttttatgtacagcgagcgatagcttttgttataattgtaaaaagcctaatttgcgttgtgcttttgagcttatattcagatttccatagtattgttatctattaatcactcttttaactctttttaaacgcataacttatgttttgtaccatgtacgtttaggctcggctcaaagcaaaacaagacagcacgtgacaagcctatatgggtttggcttgtgagatcggaaagaacagttggcatgaatcgtcgtattggaaataat

SEQ ID NO: 1586 - DNA, 2772 bp, Spinacia oleracea
tatagtctccccgacgtagtcactgctctttccgtatctcgatatctcgaatttctgtctctctctcttaccaacatcaataccatgagcctcagctgagagccccccatcccattcccactcaacctcccctcatttcatgtctccccccaaccacaagcgccccgcctccgcttccactgccaccagcaacagtaacctaacatccgccaccggcacctccttttcgccgccgatgaagaagcccaagcctcactctcagtctctcgactccaagaacggccttcaccactccttcaactccgctaccgacgacgccgatgaccacggtggttccatgattatggatgacgatctcaagcctgacggtatcgtttccccctcctccaattcccgtgctccgatcaccgccggtgttacggctaatttatcccgtaagaaggccacacctcctaatccctccaccaagaagctcgtcatcaagcttgttaaagctaaaccaacactcccccctaatttcgaggaagatacttgggcaatcctgaagtcagcaataaatgctatattcttgaagcagcctgattcttgtgacctggagaaactttatcaggctgttaatgatctttgcctgcacaagatgggggtgagtctttatcaacgtatagagaaggagtgtgaagcccatgtttctgcggttctgcagtcattggttggccaaagcccggatctagtggtttttctgtcacttgttgaaaaatgctggcaggacctttgtgaccaaatgctaatgattcgtggcatagcattgtatcttgataggacatatgtgaaacaaaccccaaatgtgaagtcattgtgggacatgggattgcagctttttcgtaaacatctttccttatgccctgaagttgagcacaaaactgttactggtcttttgagaatgatcgagagggaaagattaggtgaagctgttgataggactcttctcaaccatcttttaaagatgtttactgctctgggaatttaccaagagagctttgaaaaaccattccttgtttgcacagaggaattttatgctgttgaaggtgctaaatacatgcagcagtcagatgttccagactatttgaagcatgtcgaaataagattgcatgaagaacaggaaagatgcctactttacttggatgcaagtactagaaaaccactcatctcaacggccgaaaagcagcttcttgagcgtcatatttctgcaatacttgataagggcttcatgatgctgatggatggaagtcgtgttgatgacctccagaggatgtacaatttgtttaccagggttaatgcccttgagtctctgaggcaggcaataagttcgtacatccggaaagctggtcaggctacagtaatggatgaagaaaaggataaggatatggtttcttgcctcttggagttcaaggcaacacttgataaaatatgggaagaaagcttttcaaagaatgaatcttttggcaacactatcaaggactcttttgagtacctaattaatctacgtcagaatcgtcctgcggagctgattgcaaagtttttggatgagaagcttcgagctgggaataagggaacatctgaagaggaattggagggcacccttgataaagttttggtcttattccgatttattcagggtaaggatgtatttgaagcattctacaagaaggatcttgcaaagaggctgttattaggaaagagtgcttcaattgatgctgaaaagtctatgatctcaaagctcaaaactgagtgcggtagtcaatttacgaataaactggaagggatgttcaaggatattgagttatcgaaagaaataaatgagtctttcaaacaatcatctcaagcaaggacaaaacttccatcaggaattgagatgagtgtccacgtcttaaccacaggttactggccaacgtaccccccaatggatgtgcggctaccacatgagttaaatgtataccaggatattttcaaagagttttatcttagcaaatacagcggtagacggttaatgtggcaaaattcgctgggtcactgtgttctgaaagcagacttccccaaaggtaaaaaggagcttgcagtttctctgtttcaggctgttgttttgatgctatttaatgatgctgagaatctgagcttccaagatatgaaggatgccactggaattgaagataaagagttgcggagaactctccaatcccttgcatgcggcaaagttcgtgttcttcagaagattcctaaaggcagagaagtggagaatgaagactcttttgtgttcaatgatggatttgctgccccgctttatcgtataaaggtcaatgcaatccagatgaaggaaacggtggaagagaacacaagcaccactgagagagtatttcaggaccgtcagtatcaggttgatgcagctatagttcgtatcatgaagacaaggaaggtgctcagtcatactcttctgataactgaactcttccaacagctaaaatttcccataaaaccagctgatctgaagaagagaattgagagccttatagacagagaatatttggagagagacaagaataatcctcaaatatataattacttggcataaacagttgattttgagtcaatccttttagacgacacagggaaaacctggtactgtcaggtaaacgttggttgtctgataatgtacagtaatacgtatctttccttttttattccctttccttttaaacaatgtagatgtaatttttt

SEQ ID NO: 1587 - DNA, 2645 bp, Eutrema halophilum
gagagagagagcacagtgctttctttgaaagggttaattgggacatgtcttcttcttcttcatcttcttcctcttgatcctctcacccattttttcatgtctcttccaaccaaacgctctacttgctcctccgcttctcctgcctccaccgactcctcttactcttctccccctccgatgaaaaaggccaagaacggcctccacactccttcctctcagcctaacgccgccgacaaggttggcttccccatggaggatgatgcaactcccgccgccgcgaatctctctcggaagaaagctacactcccccagcctagtaagaagctcgtcatcaagctcaataaagccaaaccgagtctaccaacaaactttgaagagattacctgggaaaagctgcagtcagctattagagctatattcctgaaaaagcctgtttcttttgatctcgagaggctttaccaggctgttgataatctttgcttgcataagctggaaggaaagctttacgaacggattgaaaaggagtgtgaagaacacatttctgcagctttacaatctttagttggccaagacactgatctgtctgttttcttgtcgcttgttgagaactgctggcaagatttctgtgaccagatgctaatgatccgtagcatagccttgtctctggatcggaaatatgtgatacaaaacccaaatgtacgttcattatgggagatgggcctacaactttttcggaagcatctcgctctgtcccctgaagttgagcagaggacagttactgctctcttaagaatgattgaaaaggaaagattagctgaagctgttaataggacactactaagccatcttttaaagatgtttacttcattgggaatatatacggaaagctttgagaaacatttccttgaatgcacttctgaattttatgctgctgaaggaatgaaatacatgcagcagtatgacgttgccgagtacctgaagcatgtcgagggaaggttgcatgaagagaatgaaagatgcatactgtacatagatgcaggaaccaggaaaccgttgatagcaactatcgaaaagcaacttctcgagcgtcatatacttgctgttattgataagggtttctcaccattaatggatggacgtcgtacggaggacctccagaggatgtacaccctgttttctagggtcaatgcacttgagtctctgaggcaggcgctaagttcctacattcggaaaactgggcataagatcgttatggatgaagagaaagacaaagatatggtacaatcactattggacttcaaggcttctcttgatatagtatgggaagagagcttttgcaagaatgaatcatttggcaacaccatcaaagattcatttgagcatctgataaatcttcgccagaatcggcgagctgaacttatcgctaagtttttggatgagaagctccgtgctggaaataagggtacttctgaagaagaattggagagtacccttgaaaaagtcttggttttgttcagatttatccagggtaaagatgtgttcgaagcattctataaaaaggatcttgctaagagactcctgttgggaaagagtgcttcaattgatgctgagaaatccatgatctctaagctgaagactgagtgtggtagccagtttacaaacaagctcgaagggatgttcaaggatattgaattgtcaaaggaaatcaatgagtcattcaaacaatcgtctcaggccagaacaaaactgccatcgggaattgagatgagtgtccacgttttaacaacagggtactggccaacatatccacctatggatgttaagcttcctcatgaattaaatgtctatcaggatatcttcaaagagttctatttgagcaagtacagtgggaggaggttaatgtggcaaaattcattaggtcactgtgttttgaaggcagatttctccaaaggcaaaaaagagcttgctgtttccctgtttcaggctgttgtgttgatgttatttaacgatgcaatgaaacttagcttcgaagacataaaagattccactgggatagaggacaaggaactgagaagaactttgcagtcgcttgcttgtgggaaagttcgtgtcctgcagaagtatccaaagggaagagacgtacaagacggggatgaatttgattttaatgatacctttacagctcctctgtatcgcatcaaggtgaatgcaatccagatgaaagagacggtagaagagaacacgagtacaacagagagagtattccaggaccgacaataccagatcgatgcagccattgttcgaattatgaagacaagaaaagtcttaagccatactcttctaatcactgagctcttccaacagctgaaatttccaataaaaccggctgatctgaagaagaggatagaaagcctgatcgatcgagaatacttggagagggacaagaacaatcctcagatatataattatcttgcttagaatctctctcgtaaacaccttcataacattttcttctctgtatattttattcacaatcagtggtcgaattttcttcttcaatttggaaaaaaaaaaaagaaaaaaaagaactcagagattccgatgatctttcttgccttttcgactgattttatgtatatgcttgt

SEQ ID NO: 1588 - DNA, 3232 bp, Amborella trichopoda
ctctctctctctagacctcccaaatctctctctctctctctcttcgagtacagagcctaaaagaacaaaggaatggagcaggaagtcggcctttctgcaacttgcaccgcccgctttcttcctcgcctcctatccccatcacccaatttattttgatcatcaaagatagagagagcgtgtgttttaaaaaggtaaaagagagagagagatgctccttcattgatgtctcaggcaaagcggcacagcagctgctccccctcggccaccacaagcagcggcaacggcggcacgggccccgccatgaagaaggccaaatccttatcttcctctgcatctcaaccccctttctcttcttcttcctccgataagcaaaaccctcgctttttagacgaggatgccatgcttgtcgatcgcaaagatgaggtcattcccgtgcctgcagcgcaggctgtggcgctcagtgcagggtgcagtggcacaggaatggctgccaatttgtcgagaaagaaggcgaccccaccacagcccacgaagaagcttgtcatccgcccattcaaagataaacccaaattaccaactaattttgaggaggatacatgggcaaaactgaagtctgctatcagcgctatacttttgaagcaaccggtgtcttgcagccttgaagagctatatcaggctgttaatgatctttgtcttcacaagatgggaggaaacctgtataagcgaatccaaaaggaatgtgaggagcacatatcaaaaactattcaatctttggttggtcagagtccagatttggttgtctttctgtcacttgttgagaaatgttggcaggatctttgtgaccagttgttgatgattcgtggtatagccttatatctcgacagaacatatgtcatacaaacctccaatgtacgctcattatgggacatggggttgcaactatttcggaagcatctttccttatgtccagaagtagagcacaaaacagttactggtcttctaagattgatagaaagggaaagattaggtgaagctattgacagggcactccttaatcatcttttgaggatgtttacctctctggggatatacactgagagctttgagaagcccttccttgagtgtacatctgagttctacgcttctgaaggtgtgaaatacatgcagcaatcagacgttccagattacttaaagcatgtggagttaaggttgcatgaagaacacgaaagatgctttgtgtacttggatgcggcgactagaaagccactggtgttgactgctgagcggcagcttcttgtgaaccatactgcagcgatccttgataagggatttactttgcttatggatgcgaatcggattccagatcttcacagaatgtacgtgctgtttgcaaaggttcatgcccttgaattactacgtcatgctcttagttcgtatatcaggagtactgggcaaagtattgttatggatgaagagaaagacaaagatatggtctcctgtcttttggaatttaaggctcgtcttgatacaatatgggaacaaagctttaactataacgacgtgttctctaacaccataaaagatgcatttgagcatctcattaatctccgccagaaccggcctgctgagctaattgcaaagttcctggatgagaaacttcgtgctggaaataagggaacatcagaagaggagttagagggtaccctagacaaggttctggttcttttcagatttatccaagggaaagatgtatttgaagcattctacaagaaagatcttgcgaagaggttactactggggaagagtgcatctatcgatgctgagaagtctatgatctccaagctcaaaactgaatgtgggagccaatttacaaataaactggaaggaatgtttaaggatattgaattgtcaaaggagataaatgaatcctttaagcagtcttcacaggccaggacaaaacttccttctgggattgaaatgagcgtgcatgtcttaacgactggatactggcctacatatccaccaatggatgttagacttcctcacgaactaaatgtttatcaggacattttcaaggagttttacctgagcaaatatagtggaagacgcttaatgtggcaaaattccttgggtcattgtgttctaaaagcagagtttccgaaaggaaaaaaggagctggctgtgtccctttttcagacggttgtgttgatgctgttcaatgatacttccaagctcagctttcaagatatcaaggatgccacttgcattgaggataaagagttgcggagaacattgcagtctcttgcctgtggcaaagttcgcgttctccaaaagctcccaaaaggaagagatgtggaggatgaggactctttcttgttcaatgaggaatttagtgcacctctttaccgcttgaaggttaatgcaattcaaatgaaagagactgttgaagagaacacaactaccactgaaagagtatttcaagatcgccaatatcaggttgatgctgctatagttcgcatcatgaagacccggaaagtgttgagccacacccttttgataaccgagctctttcagcagctcaagtttccaatcaagccagctgacctgaagaagaggatcgagagcctaatcgaccgggagtatcttgagcgcgacaagagcaatccccagatatacaactaccttgcttgatgctaaaaaacaagcattctcattagccatgctttcgtcgtgctgcatcgtggattgcacacatttgtgtactcttggtgcaaggatgctggtatattgtgggatatatgggtgtacaggaaacttgatctttgttgtttacatactccagcagtttatgactgggggctggaaaaaaaaaaagaaaaaaagaaaactcactcattttatttctcttgcagaattttccccctatttggaatttgataaatgcttatcttagaatgttgctgaggctcgtgcacatgcatcgtatagttgtatgccatttattcagcttgaatgtcatagtaaccttccaaaatttatttgcctcttgtaccaagagactgaaattgcacagaagctatttcactataaaacttgggcttaaaagatttttgttccccctttcgtgcttcaatgtatctgatttatttgtaaacagaagtagaaagcgaataaattacaagaatataaaatttgaatatattcagataacagggaacaatttaagagagaa

SEQ ID NO: 1589 - DNA, 2673 bp, Arabidopsis lyrata
gggtctaaatcgcgaaatttgcgtaggtctgagaaaaaaaaaaaaaaaaaaaaaagagagagtgcacagtgcgcttttggtagagagaaagggttcttatttgggattatgtcttcttcttctccttcttcgtgattctctcacacaattttcacccattttcatgtctcttcctaccaaacgctctactttctccgccgcttctgcctccgacgactcttcttactcttctcctccgatgaaaaaggctaaaaacgacctccaccattccccgcaacaccctaacaccgccgacaaggttggctttcatatggaggaagatccaactcccgccgctgcgaatctctctcggaagaaagctacactaccgcaacctactaagaagcttgtaatcaagctcaataaagccaaaccaaccttgccaacaaactttgaggagactacatgggagaagttgcagtcagctatcagagctatatttctcaaaaaaccattttcttttgacctcgagagcctctaccaggctgttgataacctttgcttgcataagttggaaggaaagctttatgaccagattgagaaggagtgtgaagaacacatctctgcagctttgcaatctttagttgggcagaacactgatctgactgttttcttgtcacttgttgagaaatgctggcaagacttttgtgaccagatgctcatgatccgtagtatagccttgactctggataggaagtatgtgatacaaaatccaaatgtacgttcattatgggagatgggtttgcagcttttccggaagcatctttctctggcccctgaagttgagcagaggactgttaaaggtctcttaagtatgattgaaaaagaaagattagcagaagctgttaataggactctactaagccatcttttgaagatgtttactgcactgggaatatatatggatagctttgagaaacctttccttgaagggacttctgaattttacgctgctgaaggaatgaaatacatgcagcagtctgacgttccggagtacctgaagcatgttgagggaaggttgcatgaagagaatgaaagatgcatactctacatagatgcagtaacaaggaaaccattgatcgcaactgttgaaaggcagcttctcgaacgtcatatacttgttgttcttgataaggggtttacaacattaatggatggacgtcgtactgaggaccttcagaggatgcaaaccctgttttctagggtcaatgcacttgagtctctgaggcaggcgctaagttcatatgttcggaaaactgggcagaagattgttatggatgaagagaaagataaagacatggtacaatcactattggacttcaaggcttctcttgacgtaatatgggaagagagctttaataagaacgaatcatttggtaacacaatcaaagattcatttgagcatctgattaatcttcgtcagaaccggccagctgagcttattgccaagtttttggacgagaagctccgtgctgggaataagggtacttctgaagaagaactggagagtacacttgaaaaagtcttggttttgttcagatttatccagggtaaagatgtgttcgaagcattttacaaaaaggatcttgcgaagagactcctgttgggaaagagtgcttcaattgatgccgagaaatccatgatatctaagcttaaaactgagtgtggtagccagtttacaaacaagctcgaagggatgttcaaggatattgaattgtcaaaggaaatcaatgagtcattcaaacaatcttctcaggccagaaccaaactaccatcgggaattgagatgagtgtccacgtgttaacaacaggttactggccaacatatccacctatggatgttaagcttcctcatgaactaaatgtctatcaggatatcttcaaagagttctatttaagcaagtacagtggtaggaggttaatgtggcaaaactcattaggccactgtgttttaaaggcagatttctccagaggtaaaaaggagctggctgtttccctgtttcaggctgttgtgttgatgttatttaacgatgcaatgaaacttagctttgaagacattaaagattccaccagcatagaggacaaagagctgaggaggacgttgcagtcgcttgcttgtgggaaagttcgtgtcctgcagaagaatccaaagggaagagatgtagaagatggtgatgaatttgagtttaatgacgactttgcagctccgctatatcgcattaaggtaaatgcaatccagatgaaagagacagtggaggagaacacaagtacaacggaaagagtattccaggaccgacaataccagatcgatgcagccattgttcgtattatgaagacaagaaaagtcttaagccatactcttctaatcactgagctcttccaacagctgaaattcccgataaagcctgctgatctgaagaagaggattgaaagcttgatcgatcgagaatatttggagagggaaaaaagcaaccctcagatatacaattatcttgcttagaatctctctggtaaacgccttttcaatattttcctctgtgtatatttattgacaaacaaacgatggccgaaattttcttattcagtttgaaaaaaaaagaactctcgatattccaatcatctattctcgttttt

SEQ ID NO: 1590 - DNA, 2319 bp, Solanum phureja
aacctttcactcatttttcttttcttgaagcgaaacctacattgccgacaaactttgaggaaaatacttgggcaactctaaagtcagctattagtgcaatattcttgaagcagcctgatccatgtgacttagaaaagctttatcaggctgtgaatgacctttgtctgcacaaaatgggtggaaatctatatcaacgaattgaaaaagagtgtgaatcacacatagctgcagcgctacgttctttagttggccaaagtgaagatcttgtagttttcttgtcgcttgttgagaggtgttggcaggatttttgtgatcagatgttgatgattcgtggaatagctttgtatcttgatagaacatatgtaaaacaaaccccaaatgtgcgttcactgtgggatatgggcttgcagcttttccgcaaacatctctctcttgcctcagaagtagaacacaaaactgtttttggcctcctacagatgattgagaccgaaagattaggtgaggcagttgatagaactctgcttaaccatcttttgaagatgttcactgccttggggatttatgctgaaagttttgaaaagccatttcttgagcgtacttctgagttttatgctgctgaaggcgtcaaatacatgcaacagtcagatgttccagattacttgaagcatgtggaggtaaggttacatgaagaacatgacaggtgcttactctacctggacgcaagtacaagaaaaccactaatagcaactgcagagaggcaacttttagaacgacacatttctgcagttcttgataagggtttcacagtgttgacggacggtaatcgtattgaagatctccaaaggatgtatatgctattttgcagggtcaatgatctcgaatctttaaggcaagcccttagctcatacatccgaagaactggtcagagcattgtgctagatgaagagaaagacaaagatatggtagccagcctcttggaatttaaggcatctcttgatacaatatgggaagaaagcttttctaagaatgaagcttttagtaacactatcaaggatgcatttgagcatctcattaacatccgccagaatcgacctgccgagctgattgctaaatttttggacgagaagcttcgtgctgggaataaaggtacatcagaggaggaattggaggggacattagataaagtcctggttttgttcaggtttatacagggtaaggatgtatttgaagcattctacaagaaagatcttgcgaaaagactgttgttgggtaagagtgcttcaattgatgctgaaaagtccatgatttctaagttgaagaccgagtgtggcagccagttcactaacaaattggaaggaatgttcaaggacattgaattatcaaaagagataaatgaatccttcaagcaatcttcccaagccagaacaaagctcccaacagggatcgagttgagtgtccatgttttgacaatggggtactggccaacctatccccccatggatgttcgacttccccacgaactcaatgtctatcaggatattttcaaggagttctacttgagtaagtacagtggtaggcgtttgatgtggcaaaattcattgggccactgtgttctgaaagctgaatatccaaaaggaaaaaaggagctcgcagtttctctgtttcagactgttgttttgatgctttttaatgatgcggaaaaccttagcttccaagatatcaaggaagcaactggaattgaggataaagagctgagaaggactctacagtctcttgcatgtggaaaagttcgtgttctccagaagattccaaaaggaagagatgtggaggacgatgatacctttgtgtttaatgatcaatttactgctccactatatcgtataaaggtaaatgccatccagatgaaggaaacagttgaggagaacacaagcactactgagagagtatttcaggaccggcaataccaggttgatgctgctattgttaggataatgaagaccagaaaagtgctgagtcacaccctcttaataactgaactctttcagcagcttaaattcccaataaaaccagctgatctgaagaaaaggattgaaagcctcatagatagggagtacctggaacgggacaaaaacaatcctcaaatatacaactaccttgcttagaatgtttccagacatcaaaaaaaaaaattccatgtaaatgacttgggagacttccttgtcagcttctgtacagttgactttgtaaccattaattttgttgtcatatacattgtaaagcttatatttaagtttatttggtgtgtctactttttttttt

SEQ ID NO: 1591 - DNA, 2655 bp, Fragaria vesca
cgcgcccagcccgacaatttgtcccgcaaaaaggcccagccccctcagcccggcaagaagcagttcgtcatcaaacccttcaaagccaaaccggctgtacccaaaaatcttgaagaggaaacatgggaaatactgaagtctgccatttgtgctatattcgaaaagaaacccgtttcatgcgtcttggaggaactttatcaggctgtttataatctttgtgtgcacaagatgggagggagtctgtatcagcgaatcgaaaaagagtgcgaaagacacatagcagcggcactgcagtcattggttggccaaagcccagatttggtggtgttcttatcacttgtcgagagatgttggcaggatctctgtgctcaaatattgatgatacgcgatatagccctgtatcttgatagaacttatgtgaaacaaacaccaaatgtgcgttcattgtgggacatgggtttgcaactcttccggaaacatctttccctctcaccagaagttgagcacaaaattgtcactggccttttaagaatgattgagaaagaaagattaggtgaagctgtggctaggactctcattaaccatctaacgaagatgtttatagctttaggaatgtattgggagagctttgagaagccatttcttgagtgtagttctgaattttatggtaccgaaggagtgaaatacatgcagcaatcagatgttcccgagtacttgaaacatgttgagaaacggttgcatgaagaacatgaaagatgtttactctacttggatgcaagcacaagaaagccattggttgcaactgcagaaaagcagcttctagagctccatatacctggcatactcgacaaggggttcacgatgctgatggatgggaatcgcattgaggaccttcagaggatgtacactcttttcttaagagtaaatgctcttgaagcactcaagcaagcccttagctcatacattaggaagacagggcagaaaatgatcatggatgaagaaaaagataaagacatggtttcttcgcttttggagtttaaggcttctcttgacactatatgggaagaaagtttttccaagaatgaagcattttgcatcactataaaggacgcatttgagcatcttataaatctccgccagaatcgacctgctgagcttattgcaaagtttctggacgagaagcttcgagctgggaacaagggtacttccgaagaggaacttgagggcacacttgataaagttttggttttatttaggtttatacagggtaaggatgtgtttgaagcattttacaagaaggatcttgcaaaaagactacttttgggaaaaagtgcttctattgatgctgagaagtcgatgatttccaagctgaagaccgagtgtggcagtcagtttacaaacaaactcgaaggaatgtttaaggatattgaattgtcgaaagagataaatgagtccttcagacagtcgtcccaggccaggacaaaactcccatcagggattgagctgagtgttcatgtccttacctcggggtactggccaacatacactcccatggatgtgagacttcctcatgagttgaatgtttatcaggatattttcaaagagttttacttgagcaagtacagcggtaggcgtttaatgtggcaaaattcattaggtcactgtgtgttaaaagcagagtttcctaaaggcagaaaggagcttgcagtttctctgtttcagactgttgttttgatgctttttaatgatgccgagaagctaagctttcaagacattaaggattccactagcattgaagacaaggaacttcgaagaactctgcagtcacttgcatgtggaaaagttcgcgtcctgcaaaagttacccaaaggaagagacgtggaggataacgattcattcacattcaatgatacatttacagctcctctctaccgtattaaggtaaatgcaatccaaatgaaggaaacagtggaggagaacacaagcacaactgaaagagtattccaagaccgccaatatcagattgatgctgctattgttcggataatgaaaactaggaagctgctgagtcacacaattctgataactgaacttttccagcagcttaagttccccataaagccggcagatttgaagaaaaggattgagagcctgattgacagggagtacctagaacgggacaagaacaatccacaagtctacaactaccttgcataagtatcctttttgaagtttctccttgtaaatgacatgggaagacttcgatttctttctcaaggatgaaagagagaaagaggcaggatttcgagtccgacttcaactcggtccggtatctgaaatttatgtacagtgactttgtagtttttgcagttttgttgcggtcagtactgaaccactgattgcaaagaatatttattttcccctttcttatttctattcctgtggaagaattgtgtacttgaatgaatgagagtacttcctttttttcttttttctgaaataggaatatatataaaaacagaggaaaaagaaattctagctcggtctctttccaccatataatcgtatatgtatcttgatatcatgtgattgtacaccttctcgagctgacttgtactttttagctacatcgacctaacttgatagtagccgagc

SEQ ID NO: 1592 - DNA, 2774 bp, Plantago ovata
ctccgccgccatcgccgccgccgctccaacgtccccaattccgccgggaatgaaaaaggccaagtcatactcactcgattcgaataagaatggcaccaatcagcagctcaatcacttcgctgctgctggctccccgatgatcgaagacgatccgaacgaggaggcatcgtcatctcgcggcggctcagcttcttccggtggtggaatgaccacgaacttgtccaggaagaaggccacgcctcctcagccggctaagaagcttgtaatcaagccgtttaaagcaaaaccaacgctgccaagcaattttgaagaaattacatgggagaaacttaagtctgctatcagtgccatatttttgaaacggccagatccgtgtgacttggagaagctctatcaggcggtgaatgacctttgcttacataagatgggaggcaatctttatcagcgaatagaaaaggagtgcgaatcatttatatcttctgctctacaatctctggtgggccaaagtgaagatctggtggtttttctatcacttgcagagaagtgttggcaagaattttgtgcacagatgttaatgatccgtggaatagcattatacttagatagaacatatgtcaagcaaaatgccaatgttcgttctttatgggacatgggcttgcagctttaccgcaaacatcttgccctagcttctgaagtggagcacaaaactgtatttggtatactaaaaatgattgatagtgaaagattaggtgaagcagttgatagaactctccttaatcatcttttgaagatgttcactgcactgggaatatattcagaaagttttgagaagccattccttgaatgcacctcggaattttatgcatctgaaggtgtcaagttcatgcagcaatcggacactctggaatatttgaaacatgtagaaataaggttgcaagaagagcatgacagatgcttaatttacttagatgctagcactagaaaaccattagtagccaccgcagaaagacaactcttggagcgtcatatacctgcaattctggaaaagggcttcacaatgcttatggatgggaagcgtattgaagatcttcagagaatgtatactctcttcagcagggtaaatgcccttgaatctttgaggcaatcacttggtcaatatatccggaagactggccaggtcatggtcgttgatgaagagaaggacaaagatatggtatctagcttattggattttaaagcaaaccttgatcgaatatgtgaagaaagcttctcctcaaatgaagcattcagtaataccctcaaggatgcttttgagcatctaatcaatctgcggcagaaccgacctgcagagctaatcgcgaagtttgtggatgagaagctccgcgctggaaataagggtacgtcagaggaggaattggagggtacactggataaagtattggttttgttccgattcattcagggaaaagatgtgtttgaagctttttataagaaagatctagctaaaaggctcttactgggtaaaagtgcctctattgatgcggaaaaatctatgattacgaagttgaaaaccgagtgtggcagtcagttcaccaacaaacttgaggggatgtttaaggacattgaattgtcgaaagaaatcaacgagtcattcaaacaatcctctcaagctcggacaaaacttccatctggaattgagttgagtgtccacgtcttaacaacaggatactggccaacctatccacccatggatgttcgactgcctcatgaactcaatgtttatcaggatattttcaaggagttctacttgagcaagtatagtgggaggcgattaatgtggcaaaattcattaggccactgtgtacttaaagcagaatttccaaaaggtaaaaggagctagcagtttctctatttcagactgttgtcttgatgctgtttaatgatgcacaaagtcttagcttccaagatatcaaggaatcaactggtattgaggataaagagctcaggaggactttgcagtcccttgcttgtggaaaaattcgtgtcctacagaaaaatcccaaaggaagagatgtagaggatgacgactccttcgagttcaacgatcaatttactgccccactatatcgtataaaggtgaatgccattcagatgaaggaaacagtcgaggaaaatgctagtactacagaaagggttttccaagatcgtcaatatcaggttgatgctgctattgttcgtataatgaagacaaggaaaatgctaagccacacccttctgataactgaactctttcagcagctgaagttcccgatcaaaccagctgacttgaagaaacgaattgagagcctcattgacagggaatacctggagcgcgacaaaaataatcctcaagtatacaattacctggcttaaaatgatgattggtaatttatacatcgtaaatgacgtgggaatcttatgaatccatgttaagtttgtgtacaggagctcaaagttcttcctttctgttgtgatgttcagtgtaactgtaaagctataatttattactctctaaaaactcaaaactaccaactccgacaagtttaccagtactcacttgagtacctatgcactttgtaaggtatttggcgtttatatttgatacagtaatatgaagggaatctttagttttcatctgtgatggcaaaattagctgttaccacacaaaatagaactacagtatgttctctcgctcaggaccctggttacctggattggatcgatcaactggaatg

SEQ ID NO: 1593 - DNA, 2829 bp, Amorphophallus konjac
ccggccacggcgcggaacccttctcgccccctcccgccactctccttgctcgtccccgccatgaagaaggccaagtcccagcagtccccggccccggcgtgccctctcgagaagaacggcctccagcagcagcaccatcacttggatgcagacgacggcgtcgcggcggcgcacgccgccgacgaggacgccatgctcctcgaccaggacgacctcaaggcggcggctgctgatgatgccatccccgcgcctgcggtcacgacaggcacggctgccaacctctccaggaagaaggccgttcctctccagcccgccgccaagaagcagctagtcatcaaacttgtgaaaggcaagccaaagttgccaaccaattttgaagaggacacttgggcaacattgaagtcagctactacagctatatttttgaagcagccagatccctgtgacttggagaaactctatcaggccgttagtgatctttgtctgcacaagatggggggaaatctttatcagcgcatccagagggaatgtgaagtacatatatcaacggcattgcaatcactggttggacagagccctgatttggttgtattcttgtgcttagtagagaaatgttggcaggacttctgtgatcagatgctcatgattcgtggtatagcattatatcttgatagaacatatgtcaaacaaactccaaatgtgcgctcgttgtgggatatgggtttgcagctgtttcgcaagcatctttcattgtctgtagaagtagagcataaaactgtcaccggccttctacgattaattgagaaggagaggtcaggtgaagcaattgataggacacttctcaatcatctcttgaagatgtttactgccttaggaatctacacagaaagctttgaaaaaccatttctggaatgtacttctgaattttatgctgctgaaggtgtgaagtacatgcaagaatcagatgttcctgattacttgaaacatgtggagttaaggctgcatgaagaacatgaaagatgtctgctctacctagatgcaaacacaagaaagccactggtggcaactgctgaaaggcaactccttgcccgtcacatatcatcaattcttgacaagggattcacggtgctaatggatggaaatcgcattgaggatctcaagagaatgtacaacttattttcaaaggttaatgctcttgaattattaagacaagccctcagttcatacatccggggaactgggcagagcattgtcatggatgaagagaaagataaggacttggtttcctgtctcctagagtttaaggccaccctcgatactatttgggaggaaagtttttccaggaatgaatccttttcaaacaccataaaggatgcatttgagcatctcatcaatctccgtcagaaccgccccgccgaattgattgcgaagtttcttgatgagaaacttcgtgctggtaacaaaggcacatctgaggaagagttggaaggcacacttgataaagttctggtcttgttccgatttatacaaggtaaagatgtgtttgaggcattctataagaaggatctagccaaacggttattgttgggaaagagtgcctccattgatgcagagaaatcaatgatttccaaactcaaggctgagtgtggtagtcagtttacaaataaacttgagggaatgtttaaggacattgaattatcaaaagaaatcaatgattctttcaagcagtcatctcaagcacggacaaaacttccttctggtattgagatgagtgtacatgtcctaacaactgggtactggcctacatatccaccaatggatgttcggcttcctcatgaacttaatgtttatcaggatatattcaaagaattttacttgagtaagtacagtggcagacgcctgatgtggcagaactcactaggtcactgtgtgttgaaagctgaatttccgaaaggtaaaaaggagttggcagtatcactattccagactgttgtcttgatgctattcaatgatacacaaaagcttaccttccaagatatcaaggattcaactgccattgaggacaaagagttacgaaggactttgcagtcgcttgcatgtggcaaagttcgtgtacttcaaaagttcccaaaaggaagagaagtagaggacgaggacacatttgtgttcaatgaagatttcagtgctccactctaccggataaagatcaatgcaatccagatgaaagagaccgttgaagaaaatgcaagcaccactgaaagagttttccaagaccggcagtatcaggttgatgcggccattgtgcgcatcatgaagacgaggaaagtacttagccacacgctcctgataaccgagctctttcagcagctcaagttcccaataaaaccagcagacataaagaaaaggattgagagcctcattgatagggagtaccttgagcgggataagagcaacccacaaatatacaactatctagcctgatcaaccacgttaatcgtttccatggttttgctttgcccgccggcggtggtctgggtggagaggtctccgtgtcagcgatgtacaggaaccgggcactcgcaaatctgcttttttcatgctttcacgtcgacggactgttgtatcatgctactgttattattttgtgcctcatatttgaaaataattttcacatccctcgtgacaaaaaaaatgcatctctcttgcaatgccatgttcatatgttgagaaggaaattagagggccgcttagattgaggttgtaatgtactggaatctctcaattccttctttatctgaattaatgtaaaatagtgaagtttgaaatcgg

SEQ ID NO: 1594 - DNA, 2537 bp, Cocos nucifera
ccgccgccgccgccgtcgagagggagaagaatggtctccgtctccatcccgctcgcttcgaacccgccgccacccagccggccgaggaggaggattccatgctcgtggaccaggaggaccttaaggccggcgcatccactgccatcacggccaccggcgtcgccgccaatctctccaggaagaaggccacccctccccagccgtcgactaagaagcagctcgtgatcaagctcgttaaaggtaagccaactctgccaacaaattttgaagaggatacatgggcaacattgaagtctgctattacagctatatttttgaagcagccagatccatgcgactctgaaaagctttatcaggctgtgagtgatctttgcctacacaagatgggaggaaatctttatcaacgtatacagaaggaatgtgaagtacatgtttcggcaacactatcctcattggttggccagagccctgacttggttgtatttttatcattggtagaaaaatgctggcaggatttttgtgaccagatgttgatgatacgtggtatagcattatatcttgatagaacttatgtcaagcaaaccccaaatgttcggtcattgtgggacatggggttgcagttgtttcggaagcatctctctttatgttctgaagttgaacataagattgtcactggtcttctgaggttaattgagagggaaagactaggtgaagctattgataggacagtacttagtcatcttttaaagatgtttacagctcttggaatttacacagaaagctttgaaaagccctttctggaatgcacttctgagttttacgctgctgaaggtgtgaaatatatgcaacaatcagatgtcccagactatttgaagcatgtggagtcaaggctacatgaggaacatgaaagatgcttgctctacttagacgcaaatacgaggaagccccttgtagcaactgctgaaaagcaactccttgaacgacacacatctgcaattcttgacaagggatttacaatgctcatggaagctaatcgagtccaggaccttcagagaatgtacatgctctttcagagggttaatgctctggagttgttaagacaagctcttagctcatatgttcggggttctgggcaaggtattattatggatgaagagaaagacaaagatttggtttcctatctcttagagtttaaagcatctcttgatacaatttgggaagaaagtttcttcagacatgaagctttttcaaatactataaaggattcatttgagcatctcattaaccttcgtcagaataggccagctgaactgatcgcaaaatttctggatgagaagcttcgtgctggcaacaagggtacatctgaagaagagttggagggtacacttgataaagtgttggttttgtttaggtttattcaaggaaaagatgtctttgaggcattctataaaaaggatcttgcaaaaagattattgttgggaaaaagtgcatcaattgatgccgaaaagtcaatgatttctaagctcaaaactgagtgtggaagtcaattcacgaataaacttgaaggaatgttcaaggacattgagttatcgaaagagattaatgattcctttaagcaatcatctcaagctaggacaaaacttccaactggtattgaaatgagtgttcatgtccttacgactgggtattggccaacatatcctcctatggatgttcggcttccacatgaactgaatgtttatcaggatatatttaaggagttctatttgagtaagtacagtgggaggcgcttgatgtggcaaaattcattaggtcaatgtgttttaaaagcagaatttccaaaaggtaaaaaggaattggcagtgtcattgttccagactgttgtattaatgctgttcaatgacgctcaaaagctcagtttccaagatattaaggactcaactggcattgatgataaagagctgagaaggactttgcagtcacttgcatgtggcaaagtccgagttctccaaaagatccctaaaggaagggaagtagaggatgatgactcatttgtatttaatgaagaattcagtgctcctctctaccgcattaaggtaaatgcgattcaaatgaaggagacggtggaagagaacaccagcaccactgaaagagtattccaagaccgtcaatatcaggttgatgcggctattgtccgtatcatgaagacaagaaaagtactaagccacacgcttctaataactgagctctttcagcagctcaaatttcctataaaaccagcagacttgaagaaaaggatagagagcctcattgacagggaatacctggagcgggacaagaacaatcctcagatctacaattacctggcttgacccccttggcaccctaaagttacctcttctggcagcaaatcagggagttgcctccctcccagtgtcatgcatgcttggggggctggttttagcaatctcttgatgtcaaccatgtacaggagactctagccatctttttctttttgttccaagtaacacctcggt

SEQ ID NO: 1595 - DNA, 2608 bp, Flaveria ramosissima
tacaatgagtttttgattcactttcatatgtcgcaaccctccaacaacaaccgcaaacactcatctacaacctgcacatctccaccaccaccatccaccagcacaaccaccggcggcggcggcggcggaggacctcactttccggcgatgaagaaggcgaaatctcaggctgtatcttgctcgttagacaacaaaaacggcttccaaccgcatcaatttgatagtaattcgtctgttcaagacccttcgtccatgatcgtagatccgactgataacgatggtggaagagcctcttctgctggtggattcaccgctaatttggctcgtaagaaagctacgcctccgcaacctgctaagaagctcgtaatcaagcttgttaaagctaaaccaaccttgcctacaaactttgaggagaatacatgggccgtcttgaagtcggcaattaatgccatatttttgaagcagccagattcttgtgatttggagaagctttatcaagcggtcaatgacctttgccttcacaaaatggggggaagtctttatcaacggattgaaagggaatgtgaatcccacatatcttctgctttacaatcattagttggtcaaagtgaagatcttgtggttttcttatcacttgtgcacaaaacctggcaagatttttgtgaccaaatgctaatgattcggggtatagcattgtatcttgaccgtacatatgtgaaacaaactccatctgtacgatcattgtgggacatgggccttcaactctttcggaagcatctgtcactagcttcagaagttgaacacaaaacagtctttggccttctgaaaatgatagaaagtgagagattaggtgaagcagttgatagaacacttcttaaccatctgttgaagatgtttactgctctgggcatttattctgagagttttgagaagccattccttgaatgtacattagagttttatgctgctgaaggagtaaaatacatgcaaaactcagatgttccagattatttgaaacatgtggaggtaaggttgcatgaagaacatgacagatgtcttctgtatctggatgctagtacaagaaaaccattagtagcaactgctgaaaggcaacttcttgagcttcatatatctgcaatacttgataagggtttcacaatgttgatggatggtaaccgaactcaagatcttagaaggatgtattcacttttctccagggttaatgcccttgaatccttaagagttgccctaagttcatacattagaaaaacagggcaaggaattgtaacagatgaagaaaaggataaagatatggtgccttccctcttagagtttaaggcttctcttgatacaatttgggaagaaagtttttcaaagaatgatgttttttgcaataccattaaagaagcattcgagcatctaattaatctccgccagaaccgtcctgctgaattgattgccaagtttttagatgagaaacttcgtgctggaaataagggtacatcagaggaggagttggagggcactcttgataaagtattagttctgttcagatttatacagggtaaagatgtgtttgaagcattctacaaaaaagatcttgcaaaaaggcttcttttagggaagagtgcatctattgatgctgaaaagtcaatgatctccaagttgaaaaccgaatgtggtagccagtttaccaacaagcttgaaggaatgtttaaggatatagagttatcaaaagagattaatgaatctttcaagcaatcatctcaagctaggatgaaactaccctcaggaattgagatgagtgttcatgttttgacaactggttactggccaacatatcccccaatggatgtccgccttccccatgaattgaatgtttatcaggacattttcaaagagttctacttgagcaaatatagtggtaggcgattaatgtggcaaaattcattaggtcattgtgtcttgaaagcagaatttgcaaagggaaaaaaagaactggcagtttccttatttcagaccgttgttctgatgctgttcaacgatgcacaaaagcttagttttgaagatattaaagacgctactagcattgaggacaaagaactaaggagaactctgcagtcacttgcttgtggaaaattccgcgtcctccaaaagataccaaaaggcagggatgtggaagataatgatactttcatgttcaatgatggatttactgctcctctttatcgtataaaggttaatgctatccagttgaaggaaactgtggaagaaaatgcaagcactactgaaagagtattccaagatcgtcaatatcaggttgatgctgctattgttcggattatgaagaccaggaaaatgctgagtcacacacttctgataaccgaactctttcagcagctaaaatttcctataaaacccgttgacttgaagaagaggatagaaagcctgattgaccgtgaatacttggagagagacaagagcaatcctcagatatataactatttagcatgagcatcaatcaagactactaatggcaggcatggagtttggttctttaacaatttccttgtcagtttatgtaaagaaagtgatagcttttgtttct

SEQ ID NO: 1596 - DNA, 2770 bp, Chenopodium quinoa
ggcaaaatctagagcactctctccctccctctcgactctccccatcatagtcactcctcttccttccatatcccccacctctctctttcttaccaacaccaaataccatgaccctcagctaagacaccccccaacccatcttcattctccctcattttcatgtctccccccaacaccaagcgcccttcttccgccgcttccaacaccaacaccaacaacctctcttcctccgccttctcttctccgatgaagaagcccaagtcctactctcagtccctcgactccaagaatggcctccaccattccttcaactccgctgccgatgacgatacggataacgctgcttccatgattgttgatgacgatctcaagtctgatgctgctgctgtttctccttcttcgaattctcgtgctccgatcactgctggggctaccgcgaatttgtcccggaagaaggctacccctcctaatccctctactaagaagcttgttatcaagcttgttaaagctaagcccacccttcccccaaacttcgaggaagatacttgggcaaccttgaagtcagccatcaatgctatattcttgaagcagcctgattcgtgtgacctagagaaactttaccaggctgttaatgatctttgcctgcacaagatggggggaagtctttatcaaagaattgagaaggagtgtgaagctcatgtttctgcggtactgcattcattggttggacaaagtccagacctagtagtttttctatcacttgttgagaaatgctggcaggacctttgtgaccaaatgctgatgattcgtggcatagctttgtatcttgataggacatatgtgaaacagaccccaaatgtgaagtcattgtgggacatgggattacagctatttcgtaaacatctttcttcatgtcctgaagttgagcacaaaaccgttaccggtcttttgagaatgatcgagagggaaagattaggtgaagctgttgataggactcttctgaaccatcttttgaaaatgtttactgcccttggaatttaccaagagagctttgaaaaaccattccttgcttgcacagaggaattttatgctgctgaaggtgcaaaatacatgcagcagtcggatgttccagattatttgaagcatgtcgaaataagattacatgaagaacaagaaagatgtctactttacttggatgcaagtactagaaaaccactcatctcaacggctgaaaagcagcttcttgagcgtcatatatctgcaatacttgataagggcttcatgatgctgatggatggaagtcgtgttgatgatctccatagaatgtacagtttattttccagggtcgatgcccttgagtctctgagacaggcactaagttcatacatccgcaaagctggtcaggctacagtaatggatgaagagaaagataaagacatggtttcttgcctcttggagttcaaggcagcacttgataaaatatgggaagaaagtttctcaaagactgaatcatttggaaatactatcaaagattcgtttgagtacctaattaatctacgtcagaaccgtcctgcggagctgattgcgaagtttctggatgagaaacttcgagcggggaataagggaacatctgaagaggaattggagggaacccttgataaagttttggtcttattccgttttatacagggtaaggatgtatttgaagcattttacaaaaaggatcttgcgaagaggcttttgctaggaaagagtgcttcaattgatgctgaaaagtctatgatctcaaagctcaaaactgagtgcggtagtcaatttacaaataagcttgaaggaatgttcaaggacattgaattatcgaaggaaattaatgagtcttttaaacaatcatcccaagcaaggacaaaacttccatcaggaattgagatgagcgtacatgtcttaaccacaggttattggccaacgtaccccccgatggatgtccggctcccacatgagttaaatgtataccaggacatatttaaagagttttaccttagcaaacacagtggtagacggctaatgtggcaaaattctctgggtcactgtgtcctgaaagcagacttcccaaaaggtaaaaaggagcttgcagtttctctgtttcaggccgtagttttgatgctatttaacgatgctgagagtctgagcttccaagatatgaaggatgccactggaattgaggataaagagctgcggagaactctccagtcccttgcatgtggcaaagttcgtgtccttcagaaggttcctaaaggcagagaagtggaggatgacgactcttttgtgttcaatgacacatttgctgccccgctctatcgtataaaggtcaatgcaatccagatgaaggaaacggtggaggagaacacgagcaccactgagagagtatttcaagatcgtcaatatcaggttgatgctgctatagttcgtatcatgaagacgaggaaggtgcttagtcatactcttctgataacggaactattccaacagctcaagtttcccattaaaccagctgatctgaagaaaaggattgagagccttatagacagagaatacttggagagagacaagaataatcctcaaatatataattacttggcgtaaacagatcattttgagtcgaaccttctagatgacacacggaaaacctgctactgtcagctgaaggtttgtttgataatgtacagtaatttgcaccctttttttctccaacaatgtagatgtaatatttttt

SEQ ID NO: 1597 - DNA, 2658 bp, Brassica rapa
tctctgtttaattttgcgaatttcgagtaggtttgagagagagaacaaaagtttttttttttcttttttgcttctagaaagggttacgaggcttaaatcgagacaagccttcgtcttcgtctttcttttttgctctctctctcgatttttcatgtctcttccaaacaaacgctcaacttgccccgcagccgcttcttcagcctccaccaccgactcttcttactcttcccctcctcccatgaaaaagtccaaaaacggcctccactctcccttccccatggaggacgaagatccaaccccctccgccgcagccaatctctcccggaagaaggctactctcccccaccccactaagaagctcgtcatcaagctcaacaaagccaaaccaactctaccaacaaactttgaagacactacctgggctaatctgcagtcagctatcagagctatattcctcaaaaagcccttttctttcgacctcgagaggctttaccaggctgttgatgccctttgcttgcataagctggaaggaaagctttacgaacggatgcagaaggagtgtgaagagcacatctctgccgctttacattctttagttggccaagacaccgatctctctgttttcttgtccctcgttgagaaatgctggcaagatttctgtgaccagatgctcatgatccggagtatagccttgtctttggataggaagtatgttatacagaaccccaatgtacgttctttgtgggagatgggccttcaactttttcgcaagcatctttctctctcccccgacgttgagcagaggactgttactgctctcttaagaatcatcgaaaaggaaaggttagccgaagctgttaataggacactcctaagccatcttttaaagatgtttactgcactgggaatatatacggaaggctttgagaaacctttccttgaatgcacttctgaattttatgctgctgaaggaatgaaatacatgcagcagtatgacgttcccgagtacctgaagcatgtcgaggggaggttgcatgaagagaatgaaaagtgcatactctacatagatgcatcaaccaggaaaccattgatatcaactgttgaaaaacaacttctcgagcgtcatatagttgctatccttgataagggtttcacaccattaatggatggacgtcgtactgaggacctccagaggatgtacaccctgttttctagggtcagtgcacttgaatctatgaggcaggcgttaagttcctacactcggaaaaccgggcagaagatcgttatggatgaagagaaagataaagatatggtacaatcactgttggacttcaaggcttgtcttgacatagtatgggaagatagcttttgcaagaatgaatcatttggcaacaccattaaagattcatttgagcatctgataaatctgcgccagaatcgtccagctgaactaatcgccaaatttttggacgagaagctccgtgctgggaacaagggtacttctgaagaagaattggagagtacccttgagaaagtcttggttttgttcagatttattcagggtaaagatgtgttcgaagcattttataaaaaggatcttgcaaagagactcctgttgggaaaaagcgcttccattgatgctgagaaatcaatgatctctaagctcaagaccgagtgtggtagccagtttacaaacaagcttgaagggatgttcaaggatattgaattgtcaaaggaaatcaatgagtcattcaaacagtcatctcaggccagaacaaaattgccatcgggaattgagatgagtgtccacgttttaacaacagggtactggccaacatatccaccaatggatgttaaacttcctcatgaattaaatgtctatcaggatatcttcaaagagttttatttgagcaagtacagtgggaggaggttaatgtggcaaaactcattaggtcactgtgttttgaaggcagatttctccaaaggtaaaaaggagcttgctgtttccctgtttcaggctgttgtgttgatgttatttaacgacgcaatgaaacttagctttgaagacattaaagattccactggcatagaggacaaagaacttagaaggactctgcagtcgcttgcttgtgggaaagttcgtgtattgcagaagtatcccaagggaagagatgtacaagacggggatgaatttgattttaatgacacctttacggctcctctgtatcgcattaaggtgaatgcaatccagatgaaagagacagtagaagagaacacgagtacaaccgagagagtattccaggaccgacaataccagattgatgcagccattgttcgaatcatgaagactagaaaagtcctgagccatactcttctaatcactgagctcttccaacagctgaaatttccaataaaaccggcggatctgaagaagaggatagaaagcctgatcgatcgagagtacttggagagggacaagaccaaccctcagatatataattatcttgcttagtcataatctcattgctaaacagtcttttcgacatttatctctgctctgtattactgtatatttattcacaagacaatggccgacactttcttctttcagtttaaagaaaaaaaggaaactccaaagttccgattatttttcgtctt

SEQ ID NO: 1598 - DNA, 2422 bp, Chrysanthemum coronarium
gattgaagatccggctgttcagatgacgtcatcgtcttcgtctggttatgctgctaatttggctaggaagaaggctactgttccggcgcctagtaataagaagcttgttattaagctcaaaggaaagccggccatgccgacaaacttggaggaggatagatgggcagtcttgaagtccgcaattagtgccatatttttgaagcagccaggctcttgtgacttggagaagctttatcaagccgtcaacgatctttgcctctggaagatggggggaagtctttaccaacggattgagagggagtgtgaagcccacatatctggtgctttacaatctttggttggtcaaagtgaagatcttgtggttttcttatcacttgtgcagaaaacctggcaagatttttgtgatcaaatgttgatgatacgtagtatagccttgtttcttgaccgtacgtatgtgaaacaatctccaaatgtgaaatcgttatgggacatgggccttcaactttttcgtaagcatttgtcattagcttcagaagttgagcacaagacagtatttggccttctgaaaatgatagagactgagagattaggcgaaacagttgatagaacacttctgagccatctcttgaggatgttcactgccttgggcatttactctgagagtttcgagaagccattccttgaatgtacatcggagttctatgctgctgaaggagtacgatacatgcagaactcagatgttccagattatttgaaacatgtcgaggtaaggttacatgaagaacacgatcgatgtctactctatctggatgatcacacaaggaaaccacttgtagcaaccgctgaaaggcaacttcttgagctccatattaccgctatacttgataagggtttcacaatgttgatggatggtaatcgaacacaagatcttaaacggatgtatacacttttctctagagtaggtgccattgaatccttacggcaggcccttagtgcatacatccgaaaaacgggacagagcatagtaacagatgaagaaaaggaaaaagatatggtgtcctcgctcttagagttcaagttgtctcttgataaaatatgggaagatagcttctcgaagaatgatgtttttagcaacacaataaaagaggcatttgagcatctaattaatctccgccagaaccgtcctgctgagctgattgcaaaatttttggatgagaaacttcgtgctgggaacaaaggtacatcagaggaagaattggagggaactcttgataaagtcttggtcttattcagatttatacagggtaaggatgtatttgaagcattctataagaaggatcttgcaaaaaggcttcttctgggaaagagtgcatctattgatgctgaaaagtctatgatctctaagttgaaaaccgaatgcggtagccagttcaccaacaagcttgagggaatgtttaaggacatagagctatccaaggagataaacgagtctttcaggcaatcatctcaagctaggacaaagctcccttcaggaatcgagctgagtgtccacgtcttaacaactgggtactggccaacctatccaccaatggatgtccgccttccccatgaactgaatgtttatcaggaaatttttaaagagttctacttgagcaaatacagtggtaggcgactaatgtggcaaaattcattaggtcactgtgtcttgaaagcaaattttccgaaaggcaaaaaggagctggcagtatccttgttccagaccgttgttctgatgctgttcaacgacgcacaaacacttagtcttcaagatatcaaggatgctacaagcatcgaggacaaggaactgaggagaactttgcagtcccttgcttgtggaaaagtccgggttcttcaaaagcttccgaaaggcagggaagtggatgataatgattcttttatgttcaatgatacattcacggcccctctttatcgtataaaggttaatgctatccagttaaaggaaactgtggaagaaaacgcaagcactaccgagagagtattccaagatcgtcagtatcaggttgatgctgctattgtccggattatgaaaactaggaaaaccttgagtcacacgcttctgataaccgaactctttcagcagctcaagtttcctataaaaccagttgacttgaagaagaggattgaaagcctgattgacagggaatacttggagagagacaagagcaatcctcagatctacaattacctagcgtaaacatcagctccaacaagtctacttgtatacgacatcgggattggatgtttcacagtttctttgtctgtttatgtaaagtgatagcttttgtttccattgtaaagcctaattgtttaagcttctattgtagtatttttaaacacgagtggtgtggtcggcgtctctcaa

SEQ ID NO: 1599 - DNA, 2658 bp, Arabidopsis thaliana
gggtctaaatcgcgagttttcgcgtaggtttgagcaaaaaaaaaaagagagagagtgcacagtgcgcttttggtagagagaaagggttgttattatttaggattgatgtcttcttcttcctcttcgtgattctctcacacaattttcacccattttcatgtctcttcctaccaaacgctctactttctccgccgcttctgcctccgacgactcttcttactcttctcctccgatgaaaaaggccaaaaacgacctccaccattcccctcaacaccctaataccgccgacaaggttgttggctttcatatggaggaagatccaactcccgccgccgctaatctctctcggaagaaagctacacttccgcaacctactaagaagtttgtaatcaagctcaataaagccaaaccaactctaccaacaaactttgaggagaatacatgggagaagttgcagtcagctatcagagctatattcctcaaaaaaaaaatttcgtttgacctcgagagcctttaccaggctgttgataacctttgcttgcataagttggatggaaagctttatgaccagattgagaaggagtgtgaagaacacatctctgcagctttgcaatctttagttgggcagaacactgatctgactgttttcttgtcacgtgttgagaaatgctggcaagacttttgtgaccagatgctcatgattcgtagtatagccttgactctggataggaagtatgtgatacagaatccaaatgtacgttcattatgggagatgggtttgcagcttttccggaagcatctttctctggcccctgaagttgagcagaggacggttaaaggtctcttaagtatgattgaaaaagaaaggttagcagaagctgttaataggactctactaagccatcttttgaagatgtttactgcactgggaatttatatggaaagctttgagaaacctttccttgaagggacctctgaattttatgccgctgaaggaatgaaatacatgcagcagtctgacgttccggagtacctgaagcatgttgagggaaggttgcatgaagagaatgagagatgcatactctacatagatgcagtaaccaggaaaccattgatcacaactgttgaaaggcaacttctcgaacgtcatatacttgttgttcttgaaaagggttttacaacattaatggatggacgtcgtacggaggaccttcagaggatgcaaaccttgttttctagggtcaatgcacttgagtctctgaggcaggcgctaagttcatatgttcggaaaactgggcagaagattgttatggatgaagagaaagacaaagatatggtacaatcactgttggacttcaaggcttctcttgacataatatgggaagagagcttttacaagaacgaatcatttggtaacacaatcaaagattcgtttgagcatctgattaatcttcgacagaaccggccagctgagcttattgccaagtttttggacgagaaactccgtgctgggaataagggtacttctgaagaagaattggagagtgttcttgaaaaagtcttggttttgttcagatttatccagggtaaagatgtgttcgaagcattttacaaaaaggatcttgcgaagagactcctgttgggaaagagtgcttcaatcgatgctgagaaatccatgatctctaagcttaagactgagtgtggtagccagtttacaaacaagctcgaagggatgttcaaggatattgaattgtcaaaggaaatcaacgagtcattcaaacaatcttcccaggccagaacaaaactgccatcgggaattgagatgagtgtccacgttttaacaacagggtactggccaacatatccgcctatggatgttaagcttcctcatgaactaaatgtctatcaggatatcttcaaagagttctatttaagcaagtacagtggtaggaggttaatgtggcaaaattcattaggccactgtgttttaaaggcagatttctccaaaggtaaaaaggagctggctgtttccctgtttcaggctgttgtgttaatgttatttaacgatgcaatgaaacttagctttgaagacattaaagattccaccagcatagaggacaaggagctgaggaggactttgcagtcgcttgcttgtgggaaagtccgtgtcctgcagaagaatcctaagggaagagatgtagaagacggtgatgaatttgaatttaatgatgagtttgcagctccgctgtatcgcattaaggtaaatgcgatccagatgaaagagacagtagaggagaacacaagtacaacggaaagagtattccaggaccgacaataccagatcgatgcagccattgttcgtattatgaagacaagaaaagtcttgagccatactcttctaatcactgagctcttccaacagctcaaattcccgataaagcctgctgatctgaagaagaggattgagagcttgatcgatcgagaatatttggagagggaaaaaagcaaccctcagatatacaattatcttgcttagaatctctttggtaaacacaccttttgaatattttcctttttgtatatttattgacaaacaaacgatgaccgaaattttcttatcagtttgaaaaaaaaaaagaactctcgatattccaatca

SEQ ID NO: 1600 - DNA, 2585 bp, Silene vulgaris
ctaatttaactcggaaaaaggctagccttcctaatccttctaagaagctcgtaattaagcttgttaaagctaaacccacattaccccctaattttgaggaagatacctgggcaacattaaagtctgccataaacgctatattcttaaagcaacctgattcgtgtgacttggagaaactttatcaggctgttaacgatctttgtctgcacaagatggggggaagtctgtatacacgaattgaaaaggaatttgaagcaaatatatctgccgtgcttcactcattggttggacaaagccctgatctagttgtgtttctatcacttgttgagaaatgttggcaggacctttgtgaacaaatgcttatgattcgtggcattgctttgtatcttgatagaacatacgtgaaacagaccccgcatgtgaagtcattgtgggacatgggactacaactttatcgcaagcatctttatttatgtcctgaagtcgagcacaaaactgtcactggtctcctgagaatgattgaaaaggaaagattaggggaaggtgtggatagaacacttcttaaccatcttttgaagatgtttactgctcttggaatttaccaagagagctttgaaaagccatttcttgcttgcactgaggagttctatgccgctgaaggtgttaaatacatgcagcagtctgatgttccagattacttgaagcatgtagaaacaaggttgcatgaagaacaagagagatgcttactttacttggatgcaagtactcgaaaaccactcatttcaactgctgaaaagcaacttcttgagcgccatatttctgcaatacttgataagggctttatgatgctgatggatgggagccgtatcaaagacctccacaggatgtacaatttgttttctagggttaactccctagaatcattgaggcaagcattaagttctcacatccgtaaaagtggtcaggcaattgttatggatcaagaaaaagatagtaatatggtttcttgccttctggagttcaaggcagctcttgataaaatatgggaagaaagtttttcgatgaatgattccttcagtaatactatcaaggattcatttgaatacctaattaatctacgtcaaaaccgtcctgccgagctgattgcaaagtttctggatgagaagctccgtgctggcaataaaggaacatctgaagaggaattggaaggcacccttgacaaagtcttggtcttatttcgatttatacagggcaaggatgtgtttgaggccttctataaaaaggatcttgctaagagacttctgctgggaaagagtgcttcaatagatgctgagaagtctatgatctcaaagttgaaaactgaatgcggtagtcaatttaccaataaacttgaaggaatgttcaaggatattgaactatcgaaggaaataaatgagtccttcagacagtcttcccaggcgaggaccaagctcccctcaggaattgagatgagtgttcatgtcttaaccactgggtattggccaacatacctcccaatgaatgtccgccttccacatgagttaaatgtgtaccaggatatatttaaagagttctaccttagtaaatacaatggccgacggttaatgtggcaaaattcattgggccactgtgttctgaaagtcgacttcccaaaaggtaaaaaggagcttgcagtttcactctttcaggctgtggtattgatgctatttaatgatgctgaagcactaagcttccaagacatcaaggatgccactggtattgaggataaagagctccgaaggactctccagtcccttgcatgtgggaaagttcgtgtacttctgaaggaacctaaaggaagagatgtggaggatcatgactcctttgtgttccatgaaggatttaccgcaccgctttatcgtataaaggtgaatgcaatccaaatgaaggagacagtggaggagaacaccagtaccacagaaagggtattccaagaccgtcaatatcaggttgatgctgctattgttcgtattatgaagacgagaaaggtgctcagtcatacccttctgataacagaactcttccaacagctcaagtttccagtaaaacctgctgatttgaagaagagaattgagagcctaatagaccgagaatacttggagagagacaagaacaatcctcaaatatacaattacctggcctagaagttataccttatagattacaccggcaaatatgtttgtgctgccagttaaacaccggtgacatatcgtttctctgttcgatgttgtacagcaacctcaatttatattcttagttttcttaatttatagatgtatgttgtttggatgaaatgattcgtaggggaagggacgagagaggagagagggagacgagagagaaatagttttctttgtttgtttagtaaattggccacattaccgtcgaaaagacatggaagtaaaattccaaggctcttctctagttttccccttcatctcctttcctcatccttccacttttctacccaacaaagttgtattatcctttctccatgtatttggaatattatttttcttatttgatat

SEQ ID NO: 1601 - DNA, 2424 bp, Chrysanthemum coronarium
tccggctgttcagatgacgtcatcgtcttcgtctggttatgctgctaatttggctaggaagaaggctactgttccggcgcctagtaataagaagcttgttattaagcttaaaggaaagccggccatgccgacaaacttggaggaggatagatgggcagtcttgaagtccgcaattagtgccatatttttgaagcagccaggctcttgtgacttggagaagctttatcaagccgtcaacgatctttgcctctggaagatggggggaagtctttaccaacggattgagagggagtgtgaagcccacatatctggtgctttacaatctttggttggtcaaagtgaagatcttgtggttttcttatcacttgtgcagaaaacctggcaagatttttgtgatcagatgttgatgatacgtagtatagccttgtttcttgaccgtacgtatgtgaaacaatctccaaatgtgaaatcgttatgggacatgggccttcaactttttcgtaagcatttgtcattagcttcagaagttgagcacaagacagtatttggccttctgaaaatgatagagactgagagattaggcgaaacagttgatagaacacttctgagccatctcttgaggatgttcactgccttgggcatttactctgagagtttcgagaagccattccttgaatgtacatcggagttctatgctgctgaaggagtacgatacatgcaaaactcagatgttccagattatttgaaacatgtcgaggtaaggttacatgaagaacacgatcgatgtctactctatctggatgatcatacaaggaaaccgctagtagcaaccgctgaaaggcaacttcttgagctccatattaccgctatacttgataagggtttcacaatgttgatggatggtaatcgaacacaagatcttaaacggatgtatacacttttctctagagtaggtgccattgaatccttacggcaggcccttagtgcatacatccgaaaaacgggacagagcatagtaacagatgaagaaaaggaaaaagatatggtgtcctcgcttttagagttcaagttgtctcttgataaaatatgggaagatagcttctcgaagaatgatgtttttagcaatacaataaaagaggcatttgagcatctaattaatctccgccagaaccgtcctgctgagctgattgcaaaatttttggatgagaaacttcgtgctgggaacaaaggtacatcagaggaagaattggagggaactcttgataaagtcctggtcttattcagatttatacagggtaaggatgtatttgaagcattctataagaaggatcttgcaaaaaggcttcttctgggaaagagtgcatctattgatgctgaaaagtctatgatctctaagttgaaaaccgaatgcggtagccagttcaccaacaagcttgagggaatgtttaaggacatagagctatccaaggagataaacgagtctttcaggcaatcatctcaagctaggacaaagctcccttcaggaatcgagctgagtgtccacgtcttaacaactgggtactggccaacctatccaccaatggatgtccgccttccccatgaactgaatgtttatcaggaaatttttaaagagttctacttgagcaaatacagtggtaggcgactaatgtggcaaaattcattaggtcactgtgtcttgaaagcagaatttccgaaaggcaaaaaggaactggcagtatccttgtttcagactgttgttctgatgctgttcaacgatgcacaaaaacttagtcttcaagatattagggatgctacaagcatcgaggacaaggaactgaggagaactttgcagtctcttgcttgtggaaaagtccgtgtccttcaaaagattccgaaaggcagggaagtggatgataatgattcttttgagttcaatgatgcattcacggctcctctttatcgtataaaggttaatgctatccagttaaaagaaactgtggaagaaaatgcaagcactaccgagagagtattccaagatcgtcagtatcaggttgatgctgctattgtccggattatgaaaactaggaaaactttgagtcacacgcttctgataaccgaactatttcagcagctcaagtttcctataaaaccagttgacttgaagaagaggattgaaagcctgattgatagggaatacttggagagagacaagagcaatcctcagatctacaactacctagcgtaaacatcagctccaacaagtctacttgtacacggcatcgagattggatctttcacagtttccttgtctgtttatgtaaagtgatagcttttgttttcattgtaaagcctaattgtttaagcttctattgtagtattgttaaattaaatacttttattactcttacgtacacgactcttgag

SEQ ID NO: 1602 - DNA, 2797 bp, Prunus mume
ctttcacttacaatgcgctgttaatgagtttgatgtctcaccccacaaaacgctcctcagccatcaacaacaacaccattagcagcacctcctcctctctcaacccttcttcaggcccacccatgaaaaaggccaagtctcaggccgtcgcctgttccctcgatcccagcaagaatggcctccaccaccaccaccaccaccatccccacactcacccttctcaggactccgataacgacgtcgtattcgacccctctaccatggccctcgacgaagatctcaagtccgacgacccctcttcccgtgccgtcgccgccaatttgtcccgcaaaaaggcccagccccctcagcctaccaagaagctcgtcatcaagctcctgaaagccaaacccacgttgcccacaaattttgaagaggaaacatgggcaaagttgaagtcagccatttgcgctatatttttaaagaaacctgattcttgtgactcagagaagctttatcaggctgttaatgatctttgcctgcacaagatgggaggaagtctttatcaacgaattgaaaaggagtgtgaaagacacatagctgcagcactgcaatctttggttggccagagtccagacttggtggtttttttatcacttgttgagagatgctggcaagatctttgtgaccagatgttgatgattcgtggtatagccttgtatcttgatagaacatatgtgaaacaaacaccaaatgtgcgttcattgtgggacatgggactgcagcttttccgcaaacatctttctctctctccagaagttgagcacaaaactgtcacgggcctcctaagactgatcgagaaagaaagattgggtgaagcggtggctaggaccctgcttaaccatcttttgaagatgtttacagctttaggaatctactcagaaagctttgagaagccatttcttgagtgcacttcggaattttatgccgctgaaggtatgaaatacatgcagcaagcagatgttccagattacttgaagcatgtggagacaaggttgcatgaagaacatgaaagatgtttaatctacctggatgcaagtacaaggaagccattagttgcaacagccgaaaagcagcttttagaacgccatatacctgccattctcgacaagggatttacattgctgatggatgggaatcgaattgaggatcttcaaaggatgtacactcttttctctagagtcaatgcccttgaatcattgaggcaagcgcttagcacatacattcggaggacagggcagggcatgatcatggatgaagaaaaagatagagaaatggtttcttcccttttggaatttaaggcttctcttgacactatatgggaagaaagctttttcaagaatgaagcattttgcaacaccataaaggatgcatttgagcatcttattaatctccgtcagaaccgacctgctgagctgattgcaaagtttttggacgagaagcttcgtgctgggaataagggtacttctgaagaggaattggagggaatgctggataaagtcttggttttattcaggtttatacagttgaagactgagtgtggcagtcagtttacgaacaaactcgaaggaatgtttaaggatattgaactgtcaaaagagataaacgagtccttcaaacaatcatcccaggccaggacaaagctcccgtcagggattgagatgagtgttcatgtcctaacgactgggtactggccaacatatcctcccatggatgttagacttcctcatgaattgaatgtctaccaggatatcttcaaagagttttacttaagcaagtacagcggtaggcgtttaatgtggcaaaattcattaggtcactgtgtgttgaaagcagagtttcccaagggcaaaaaggagcttgcagtttctctgtttcagactgttgtgttgatgctgtttaatgatgctgagaagctaagccttcaagacattaaggattcaactggcattgaggacaaggaactgagaagaactctgcagtcccttgcatgtggaaaagttcgcgtcctgcaaaagtttcccaaagggagagatgtggaggatgacgatacatttacgttcaatgacggatttactgctcctctctaccgcataaaggtgaatgcaatccaaatgaaggaaacagtggaggagaacacgagcaccactgaaagagtatttcaagaccgccaatatcaggttgatgctgccattgttcggataatgaaaactaggaaggtgctgagccacactcttctgataacagaactgttccaacagcttaaatttccgataaagccggcagatttgaagaaaaggattgaaagcctgattgacagggagtacctagaacgggacaagaacaaccctcaaatttacaactacctagcgtaagaaaataaaagaaaaaaattgcagcagattttgaagtttctccatgtaaatgacacgggaatatctcttctatcttcaagaggaacaggagggaagagggaagaggcacaggatgtgaagtccagtcccctgtctgtctttgtttttatgtacagtgaccttggtagttttttttttccttttttttttcaatttttgttgcggtcaatactgattgtaaagaactttttagtctcccctttcatatttatattcctgcgaaagagtctagtacttgaagaaatcaattgcagatattttttttcttcttcttctgttttcaatttctgaaatagggttatgttatatgtaaacaaagaaagcaaaaaaataaaataaaaaaa

SEQ ID NO: 1603 - DNA, 2819 bp, Solanum lycopersicum
atatttattttgaggctaaagaaatcgcctctcattttgtgttgtacaaatagtgtgagctcacaagttttcactctttttctcttttgtcttctttattattatatatatgtctcaaccgaacaagcgatcttcttccctgagtacaccaccaccatctccactttcccgttcaatgaagaaggccaagtctcaggccgcagctactgatgacaacaagaatggccagcagcagcagcagcaccaccaccatcaccacaaagacgaaccttgtgtgtccatgatccaatattcgggtggtggggttacttccaatttgtctcgaaagaaagctacccctccacagcctcctaagaagcagctcgtcattaagctcaataaagcaaaacctacgctcccaacaaattttgaagaaaatacttgggcaactctgaagtcggctatcagtgcaatattcttaaagcagcctgatccttgtgacttggaaaagctttatcaggctgtcactgacctgtgtctgcacaagatgggtggaagcttataccaacggattgaaaaagagtgtgaggcacacatagttgccgtattgcagtccttagttggccaaagtgaagatcttgttgtttttctatccgttgttcagaggtgctggcaggacttctgtgatcagatgttgatgatccgtggtatagcgttgtatctagacagaacatatgtgaaacaaaccccaaatggccattcattgtgggatatgggtttgcagcttttccgcaaacatctttgtctagcttcagaagtagaacacaaaattgtctttgggctccttcagatgattgagagtgaaagattaggtgaggccgttgatagagctcttcttaaccatcttttgaagatgttcactgccttaggaatttacgcagagagctttgagaagccatttgttgagcgcacttctgagttttatgctgctgaaggtgtcaaatacatgcaacagtcagatgttccagattacttgaagcatgtggagttaaggttacatgaagaacatgataggtgcttgcactacctggattcaagtacaagaaaaccactaatatcaactacagagaggcaacttttagaacgacatgttgctgcaatacttgacaagggtttcatgatgctgatggatggaaagcgtattgaggatcttcgaagaatgtattcactattccctagggtagaggcgcttgaatcgttgaagcaaactcttagcttgtacatccgaaaaaatggtcaaagcattgtgcatgacgatgaaaaagataaagatatggtatctagcctgttagaatttaaggcatccgttgatactatatgggaagaaagtttttctaaaaatgaagcatttggtaacactatcaaggatgcgtttggacatctcataaatgtctgtgagaatcggcctgccgagctgattgctaaatttctggacgaaaagcttcgtgctggaaataagggtacttcggaagaggaattggagggtatacttgataaagtcttggttctgttcaggtttatacagggtaaggatgtatttgaggcattctacaagaaagatctagcaaagagattattgttgggaaagagtgcttcaatagatgcagagaagtccatgatctctaagttgaagactgaatgtggtagtcaattcactaacaaattggaaggaatgttcaaggatattgaattgtcaaaagagataaatgaatcctttaagcaatcttctcaagccaggaaaaaactcccaacaggaattgagatgagtgttcatgtattaaccacagggtactggccaacttatccgcccatggatgttcggcttccccatgaactcaatatctatcaggatattttcaaggaattctacttgagcaaatacagcggtaggcggttgatgtggcaaaattctttgggacattgtgtcctaaaagcggagtttcccaagggtaaaaaagagctggcagtgtctctgtttcaggctgttgttttaatgctttttaatgatgcggaaaagcttagctttctagatatgagggaagcaactcgaattgaggataaagagctcaggagaactttacagtctcttgcatgtggtaaagttcgtgttctccagaagattccaaaaggaagagatgtggaagacgacgatacctttgtgttcaatgatcaatttactactccactctatcggataaaggtaaatgccattcagatgaaggaaacagttgaggagaacacaaacaccacagaaagagtattccaggaccggcaataccaggttgatgctgctatcgttaggataatgaagaccagaaaagtgctgagtcatacccttttgataactgaactctttcagcagcttaaattccctgtgaaaccagctgacttgaagaaaaggattgaaagcctcatagaaagggagtatctggaacgagacaagaacaatcctcaagtttacaactatcttgcctagaaacgttcatgccataaaattttccttgtaaatgactcgagatatgacttccattctcagattcaactgtaaagttaacgtttatttcatacatagatatatctactcttttgaagaaaaaaaacatgaacaagtgcatcctttcaatacaatgtgcattatggcaaaattgttttcttgcatgtttctatcaccaagtaattagcgtgcgcgcacgattcgaatttaatcaataaacggtaacaaattagaacttgtgattcattcaaaaacatcacatctgaagaaacaaacaacttcaaag

SEQ ID NO: 1604 - DNA, 1508 bp, Glycine max
aattctttccctcaatttctgcgagtaggttcacgggtaggcatttttatttgcacgtttctctggtgagggcaagatcacagaattggtgtgagagagatgggttcgtccgtgaagctttcaaggagggccttggaaactgagatgcccgttatggttcagatgcaggaattgcaacgaggagctaagaatgccttgtctttggcccagggggtggtttactggcagcctcccaagcaagcgttggaaaaagtgaaagaacttgtatctgagcctttaattagtcgttatggtaacgatgaaggtattcctgaactcagagcagcattagtcaaaaagttgcgtgatgaaaataatttgcacaaatcttcagtaatggttacatcaggtgccaatcaggcatttgtgaatctagttcttactctctgtgatccgggtgattctgtggttatgtttgctccttactacttcaatgcgtacatgtccttccagatgactggcattaccaatattctagttggtcctggtagctcagacacactccatcctgatgcagattggttggaaagaatattatcagaaaataaaccggctccaaagcttgttactgttgtaaatccaggcaatccatctggaacttacattccagagccccttctaaagaggatttcagatctctgcaagaatgctggctcttggcttgttgttgataatacatacgagtattttatgtatgatggcctgaaacactcttgtgttgagggaaatcatattgttaatgttttctcattctcaaaagcatatggaatgatgggatggcgggttggatatatagcgtacccctctgaagtaaaagacttcgctgaacaacttctcaaagttcaagacaacattcccatctgtgcttcaatattatcacagtatcttgccctgtattcattggaagtggggcctcaatgggttttagaccaggtaaaaactcttgaaaagaacagagaaattgttttagaagctctctcccctcttggagagggttctgtgaaaggaggagaaggtgctatatacctgtgggcaaagctcccagacttagacgctcacgatgattttgatgttgttcgctggctagctaacaagcatggggttgcagtaatcccaggaaaagcatgtggttgtcccagcaatcttagaatttcatttggaggcttgacggagaatgactgcagagctgccgcagaaagactgaagaaaggcttagaagaattggttagagacggactgcgggagtaactgaaactaatcatagaacatccccttcccaagccaagcctccaaaaaactatagatatcaatagaaagaaatttcacttgccaatgtagcaagtttgcaacttttgcatttgaataaatggaggattttactttctatccggttaaagttgtgggatatcaatagaaagaaatttcacttgccaatgtagcaagtttgcaacttttgcatttgaataaat

SEQ ID NO: 1605 - DNA, 1752 bp, Vigna unguiculata
ataagactttgaaagttggtgtcttctggtttggtaggttcacgggtaggctattttttttttttttaatttctggtgagggcaagatcaaagaattggggagagatgagttcgctcttgaagctttcaaggagggccttggaaactgagatgcccgttatggttcagatgcaggaactgatccgaggatctaaaaatgccgtgtctttggcccagggagtggttcattggcaacctccagagcaagctttgaaaaaggtgaaagaacttgtatctgatcctatagtcagtcgatatggtgttgatgaaggtattcctgaacttagagcagctttgataaaaaagttgcgtgatgaaaataatttgcacaagtcttcagtgatggttacagcaggggccaatcaggcatttgtaaatctagttctcactctctgtgatccggatgattctgtggttatgtttgctccatactacttcaatgcatacatgtcgttccagatgactggtgttaccaatatactagttggtcctggtagcccagactcacttcatcctgatgcagattggttggaaaaaatattatccgaaactaaaccacctccaaagcttgtaactgttgttaacccgggcaatccaaccggaacctacattccggagcctcttttaaagaggatttcagatctgtgcaagaaggctggctcttggcttgttgttgataatacatacgagtattttatgtacgatggcctgaaacattcttgtattgagggaaatcatattgttaatgttttctcattctcaaaagcatatggaatgatgggatggcgggttggatatatagcttacccctctgaagtagaaaactttgctgaacaacttctgaaagttcaagacaacattcccatctgtgcttcaatattatcacagtatcttgccctgtattcactggaactgggtcctcagtgggttgtggacagagtaaaaagtcttgaaaagaacagagaaattgttttagaagctctctctccccttggagagggttctgtgaaaggaggagagggtgccatatacctgtgggcaaagcttccacatgaaaatgcctacgatgatttcgatgttgttcgctggctcgctcacaagcatggtgttgcagtaatcccaggaaaagcatgtggttgtcctggcaatcttagaatttcatttggaggcttgacagagaatgattgcagagctgctgcagaaagactgaagaaaggcttagaagaattggttagagatggactgagtcagtaactgaaattaatcatacaacatcatccccttcctccatactggaaaaacaaaaacagtagatatcaatagaaacaaatttcacttgccaatgttgcaagtttgcaactgatgaattttgaataaatggaggatttactttctacccggtcaagttgtgggatagcaagttttcattattttcattttcataaatttcaaaacattggcttcaaatgcatgcatgcacttctttcatacaaacttatctgattgatctaactgtcataaaatccgacctaacaagcaagaaggacccttcttgttttttaaagctttatggaaatttattttatccatccttcacaatcaagagatttacagcagatgtttgtggtggatttgtggtcttagaacttagaactcctcaattgtcttccatttatcagtcacctatttgtactgtctgtaatggctcgatct

SEQ ID NO: 1606 - DNA, 1664 bp, Phaseolus vulgaris
agtagttgtagcagtagcaatagtagtggaaactgactcactcttttgctgctcaaaatatattcattctgacaacccaaaagtcaaacaaagaaaaccaccaaaaggtgggttcacgggtaggctttttatttttctggtgagggcaagatcacagaattggggagagatgagttcgctcttgaagctttcaaggagggccttggaaacagagatgcccgttatggttcagatgcaggaagtgatccgaggatctaaaaatgccgtgtctttggcccagggtgtggttcattggcaacctcccgagcaagctttgaaaaaggtgaaagaacttgtatctgatcctatagtcagtcgatatggtaatgatgaaggtattcctgaactcagagaagcattaagaaaaaagttgcgtaatgaaaataatttgtgcaaatcttcagtaatggttacagcaggggccaatcaggcatttgtaaatctagttcttactctgtgtgatccggaggattccgtggttctgtttgctccttactacttcaatgcgtacatgtccttccagatgactggtgttaccaatatactagttggtcctggtagcccagatacacttcatcctgatgcagattggttggaaagaatattgtcagaaactaaaccagctccaaagcttgttagtgttgtaaatccaggcaatccaagtggaacctacattccggagccccttttaaagaggatttcagatctatgcaagaaggctggctcttggcttgttgttgataatacatacgagtattttatgtacgatggcctgaaacattcttgtgttgagggaaatcatattgtcaatgttttctcattctcaaaagcatatggaatgatgggatggagggttggatatatagcatacccctctgaagtagaaaactttgctgagcaacttctcaaagttcaagacaacattccaatctgtgcttcaatattatcgcagtatcttgctttgtattcactggaactggggcctcagtgggttgtagacagagtaaaaagtcttgacaagaacaaagaaattgttttggaagctctctccccacttggagagggatctgtgaaaggaggagagggtgccatatacctgtgggcaaagctcccacatgaaaatgcctacgatgattttgatgttgttcgctggctagctagcaagcatggtgttgcagtaatcccaggaatagcatgtggttgccctggcaatcttagaatttcattcggaggcttgacagagaaggattgcagagctgctgcagaaagactgaagaaaggcttagaagaattggttagagatggactgcgtcagtgactgaaattaatcatagaacacaagcaaaccaagcctccatagtggaaaaaacagtagatatcaatagaaggaaatttcacttgccaatgcagcaagtttgcaactgatgcatttttaataaatggagaatttactttctaccctgtcaagttgtgggatagcaagttttaatttgataaatttcaaaacattcgataatggtttgatcttgaatctttatttttttccttttgttgtgcactacccagtttatgaacacattcatcataatattaatctgacacatataatcaacatttgaccttag

SEQ ID NO: 1607 - DNA, 1564 bp, Cajanus cajan
aagtcagaatcggggcattctctggtttggttggtgagacatgggttcgttcctaaagctttcaaagagggccttggaaactgatatgccagttatggttcagatgcaggaattgctccgaggagctaagaatgccgtgtctttggcccagggggtggtttattggcaacctcccgagaaagcattggaaaaggtgaaagacctcgtaactaagccgcaagttagtcgttatggtaacgatgaaggtattcctgaactcagagcagcattaatcgataagttacgtgatgaaaataatttgcacaaatcttcagtaatggttacagcaggtgccaatcaggcatttgtgaatctagttcttactctgtgtgacccgggtgattctgtggttctgtttgctccttactacttcaatgcctacatgtccttccagatgactggcattaccaatatactagttggtcctggtaacccagacacacttcatcccgatgcagactggttggaaagaatattatcagaaactaaaccggctccaaagcttgtaactgttgtaaatccaggcaatcctactggaacttacattccagagccccttctaaagaggatttcagatctctgcgagaaggctggctcttggcttgttgttgataatacatacgagtattttatgtatgatggtctgaaacactcttgtattgaggcaaaccacattgttaatgttttctcattctcaaaagcatatggaatgatgggatggcgggttggatatatagcatacccctctgaagtaaaagaatttgctgctcaacttctcaaagttcaagacaacattcccatctgtgctacaatattatcacagtatgttgcgctgtatgcattggaacaggggcctcaatgggtcgtaggcaacgtaaaaagccttgagaagaacagagaaattgttttagaagctctctcccctcttggagagggttctgtgaaaggaggagaaggtgccatatacctgtgggcaaagctcccacacggaaatgcttacgatgattttgaggttgttagatggctaattaacaagcacggggttgcagtgatcccagggagtgcatgcggttcttccggaaatcttagaatttcatttggaggcttgacagagaatgattgcagagctgctgcagaaaggctgaagaaaggcttagaagaatttgttagatatggactgcgtcagtaactgaaaaattaatcatagcagatccccttcccaagcctccatagggtgaaaaataatagataccaatacaaagaaatttcacttgccaatgtagcaagtttgcaactggtgcatttgaataaatggaggatttattttatactctgttaagttgtgggatagcaagtttttgttattttcattttgatattccaaatagatgcatgcacttctttcatattcattaaattctattacatacatgcaaaaatattctatgcctatcgatatttgctttatccatcgttttcatgagagttactgcagcagagtggttatggtagatttatgtgtctt

SEQ ID NO: 1608 - DNA, 1553 bp, Lupinus angustifolius
gaagtcaaagaaaaacacaagaaagagagagaaagaagggataggaagttactacatgatcttataatcaattaattaattaatttaataataaagaaaaagtgttttcgttttttggagaggttggtgaagcttggtgttagatgggttcctatggaaatcttgcaaagagggttgtagaaactgagatgcctattatggttcggatgcaggaattgcttcgaggagctaagaatgctgtgtctttggcccagggggtggtttattggcaacctccaaagcaagcattagagaaggtgaaagaactagtgtgggagccttctattagtcgttacggtgccgatgaaggtattcctgaactccgagtagcgttggcgaaaaagttgcgtcttgaaaataatttgcacaaatcctcagtaatggttacagcaggtgccaaccaggcatttgtgaacctagttcttactctgtgtgatgcgggggattccgtggttatgtttgctccttactacttcaacgcatacatgtccttccagatgactggcgttaccaatatactagtgggtcctggtagtccagaaacactttatccagatgcagattggttggaaaaaatattatcggaaactaaaccggtcccaaagcttgttactgttgtaaacccaggcaaccctaccggaacctacattccagagcctctcctaaagaggattgcagatctctgcaagaatgctggaacttggcttgttgttgacaatacatatgagtattttatgtatgatggtctaaaacactcatgtgtagagggaaatcacattattaacattttttctttctcaaaagcatatggaatgatgggttggagggttggctatatagcatacccatctgaagtaaaaggacttgctacccaacttctcaaagtccaagacaacattcccatctgtgcttcaataatttcacaataccttgcgctatactccatcgaattgggacccgagtgggttcaagaacgagtaaaaactcttacaacaaatagagaaattgttatagacgcactttcccctctcggagagggtgccataaaaggaggagagggtgcaatatacctgtatgcaaagctcccggaaggccatggcttcgacgatttcgaagtggttcaatggctagctaataggcatggtgttgctgtaataccaggaagtgcaagtggctctccgggcaatcttcgaatttcgttcggagggttgaccgagagtgattgcaaagcagcagcagaaagactgaagaatggattggaagaattggttagagatgggttggtgcaagattagtaacttgtacttcatttctcattgtcaaaagggaaacatagtaaagaaaactacacaaagaatgtacattttatgagtgaagcaagtttgcaattggtgcatttgacttcacaaaaaagttgatgcattacttctttgttcactattttaaacatttattgaattaacttgtcaaatcatcaatatacaataaaactcttccattatcatactccacta

SEQ ID NO: 1609 - DNA, 2475 bp, Cicer arietinum
aaaataaattacattatcaatcaatcataactgttagattattaataataattgattttaacaataattactattaaaattatatacaggattaatcctaatatttgtaaaatattttacacatgcatcaaaattaaagtcaagaaatgtgtactaagccagtctgtcccagaaattagatatgaaactcaaaagatatgacacacacaaccaaagtgaaatcgttttgaggtggtcctctgccgtttttgtcttcatttcatgactcatcagacacacactgaaaccgatacatagacagagacaaagacaacaatttcaacaaaacccattttcttaggaaccccaaatttcagtgaaaaaaattatcacccaatcacccttcttctttttcttcacaaaacaacatagattttgttcattccaatgaataggaatattctactaattcacatttcaaagaagaaaaatagttaatacccatttttcaacaccttgtaaagattgaaaatttactcctttgaatcaagggaattaaatttatttggcgttaaagaaacgcacagaagaaagagtaaaagagaaaaaaaggaaaagtttcagtttttttgggtgaagttttcagttattttttgtgtgattaaattaataataaattaaaaaaaagggttttgccttttactcttttggattggattgcgttaaagttaatgggttggtgaagagtgacgtttcaaagttgaattctttttcttcttggacaagacttagttggttttttttttttttttttaccttcttcaaatccaaaaattggagctttttttttttctctttggttttgtgttttgagctgaaaaagagagatgggttcgtacgcaaatctggctaggagggctgtggaaactgatatgccgattatggttcagatgcaggaattgcttcgaggagctaagaatgctgtgtctttggctcagggggtggtttattggcaacctccaaagcaagccttggataaggtgaaagaactcgtgttcgagccttctattagtcgttatggtaacgatgaaggtattcctgaactcagagcagcattagtgaaaaagttgcgcgttgaaaacaatttgcacaaatcctcagtaatggttacagcaggtgccaatcaggcattcgtgaatctagttcttactctgtgtgatgcgggggattctgtggttatgtttgctccgtactacttcaatgcatacatgtcattccagatgactggcattaccaatatactagtcggtcctggtaacccggaaacactttatccagatgcagactggttggaaaaagtgttatcagaaagtaaacctgttccgaagctagttactgttgtaaatcctggcaacccaactggaacctacattcctgagtctcttctaaagaggattgcgaatctctgcgagaaagctggatcttggcttgttgtggacaatacatatgagtactttatgtacgatgatctgaaacactcttgtgtggaaggcaatcacattgtcaatattttctctttctcgaaagcatacggaatgatgggatggcgggttggatacatagcatacccctctgaagtagaaggacttgcaacccaacttcttaaagtccaagacaacattcccatttgtgcttcaataatttcacaataccttgcactctactccctcgaaatgggacccgagtttgttacagaacgcgtaaaaactctcgccaaaaatcgacaaatcgtcttagaagccttatccactctcggagaaggttctattaaaggaggagaaggagctatatacctttgggtgaagatcccaaccgggcacggttacaatgattttgatgtcgttcgctggctagctaataggcacggaattgctgttatccccggaagcgcatgcggagcttcaggaaatcttagaatttcgttcggcggcttgacggaaaatgattgtagagcagcagcagaaaggcttaagaaagggttggaagaattggttgcaaatggtttggtagaagacaagtaacaaaaaatagtgagtttatagaaagaaagtccatttgccagctgaacaagtttgttgcagctggtgcatttgaataaatgttggattcaattttatagccttgttaagttggagggtagcaaggtttaataattttcattttgaaaagtagataaatgcataaacttttgtcatatcaattgacttctatatgatttgagaaaaatgatatgcagagacacttattaaattagttttacattgatatttaataaaaatagagtatgtagtagtttttttaaaaacggttacaatatatacctatatggtaggattgattcgtgttagacgattttacactattagacataatcattgtgcacgtgcatatacagaattgtgtattattagagtatgaaaatgaacgcacctttac

SEQ ID NO: 1610 - DNA, 1560 bp, Arachis hypogaea
aacagttgcggtctgtgtctctgagagagaggagagagagatgggttcgaacagaaatctagcaacgagggctttggaaacagatatgccggtaatggttcggatgcagaaattgctccgaggagctaagaattgtgtgtctttggctcagggtgtggtttattggaaaccaccggaggaagccttggaaaaggtgcaaaaacttgtatttgaaccttctattagtcgttacggtggcgatgacggtcttcctgaacttcgagcggcattaataaaaaagttgcgcgatgaaaacaatttgcacaagtcctcggttatggttactgcaggtgccaatcaggcatttgttaatctagttcttactctctgcgatgcgggggactcggtggttatgtttgccccttactacttcaattcatacatgtccttccagatgacgggcgttaccaatatactagttggtcctggtaaaccagaaacactttatcctgatgcagattggttggaaagaattttatcagaaactaaacctgtcccaaagcttgtcaccgtcgtaaatcctggcaatccatccggtacctatattccagagtctcttcttaagaggatttcagatctctgcaagaatgctggctcttggcttattgttgacaacacatatgagtacttcatgtatgatggtctgaaacactcttgtgttgagggaaatcacattgttaatgttttctctttctcaaaagcttatgggatgatgggatggcgcgtcggatatatagcatatccatctgaagtagaaggacttgctgatcaacttttcaaagtacaagacaacattcccatctgcgcttcgataatttcgcaacatcttgccctccactccttagaaatgggacctgagtgggtcacagaacgcgtcaagactcttgttaagaacagagaaatagtcctagaagctctctcccctcttggagagggttctgtgaagggaggagaaggtgctatttacttgtgggcgaagcttcctgaaggacatggttacgatgactttgaagtcgttcactggctagctaatagacatggggtcgccgtgatccctggaagcgcttccggttcgcctggtaatcttagaatctcgtttggcggcttgatagagagcgaatgcagagaagcggccgggaggttgaagagaggattggaagaattggttaagcatggcttggtgaaggagcaagagtgaaacttgtagcaaatctctatagaaaaagaaaagaaagaaagaaaatgtatactaaaggagaaaacagaagaaagaaagaagaaagttccattttgcaagtgaaacaaaaagcttgcaattgctgcaatttgaataagaaggttgtatccttgtaggtttgcaaggtttttaaatttaatctttgtattttgattttgatattaaaaacagtgattcagttcaagatagatccatatgcagatgcaatgcacttgtttttgtactcattgaattcagttcaaggttcataaaagtattattttcccttacaaaaaaaaaaaaaa

SEQ ID NO: 1611 - DNA, 1550 bp, Arachis hypogaea
ggaatttagaagctctctttctaggcaaaggattcggtaagagagagagaaagaatcagttggggtctgtgtccctgagagagaggagagagagatgggttcgaacagaaatctagcaacgagggctttggaaacagatatgccggtaatggttcggatgcagaaattgctccgaggagctaagaattgtgtgtctttggctcagggtgtggtttattggaaaccaccggaggaagccttggagaaggtgcaaaaacttgtatttgaaccttctattagtcgttacggtggcgatgatggtcttcctgaacttcgagcggcattaataaaaaagttgcgcgatgaaaacaatttgcacaagtcctcggtaatggttactgcaggtgccaatcaggcatttgttaatctagttcttacactgtgtgatgcgggggactcggtggttatgtttgccccttactacttcaattcatacatgtccttccagatgacgggcgttaccaatatactagttggtcctggtaaaccagaaacactttatcctgatgcagattggttggaaagaattttatcagaaactaaacctgtcccaaagcttgtcaccgttgtaaatcccggcaatccatccggtacctatattccagagtctcttcttaagaggatttcagatctctgcaagactgctggctcttggcttattgttgacaacacatatgagtacttcatgtatgatggtctgaaacactcttgtgttgagggaaatcacattgttaatgttttctctttctcaaaagcttatgggatgatgggatggcgcgtcggatatatagcatatccatctgaagtagaaggacttgctgatcaacttttcaaagtacaagacaacattcccatctgcgcttcaataatttcgcaacaccttgccctccactccttagaaatgggacccgagtgggtcacagaacgcgtcaagactcttgttaagaacagagaaatagtcctagaagctctctcccctcttggagagggttctgtgaagggaggagaaggtgctatttacttgtgggcgaagcttcctgaaggacatggttacgatgactttgaagtcgttcgctggctagctaatagacatggggtcgccgtgatccctggaagtgcttccggttcgcccggtaatcttagaatctcgtttggcggcttgatagagagcgaatgcaaagaagcggccggaaggttgaagagagggttggaagaattggttaagcatggtttggtgaaggagcaagagtgaaacttgtagcaaatctctatacaaaaagaaaagaaagaaagaaaatgtatactaaaggagaaaacagaagaaagaaagaagaaaggtccattttgcaagtggaacaaaaagcttgcaattgctgcaatttgaataagaaggttgtagccttgtaggtttgcaaggtttttaaatttaatatttgtattgattttgattttaaaaaacagtgattcagttcaacatagatatgcagatgcaatgcacttgtttttgtact

SEQ ID NO: 1612 - DNA, 1813 bp, Eucalyptus grandis
aacaagtctttttaagtttccgaggattaggtggaaagagacaaaaaagagagggagagtcaatgtaacgcgtaagatgccaatacccctacgatcggaaagcgtcctggcttttctcgcctcgtcgtatctcagaatttctactttacacggaaaattgtgtgcctcttccggctctttaatcggatgatattgggttggtgtcaagaaaagctgaccgtcctttgggtttcgcaccggaccagaaactttggagggcgatactacttccgagatttaatcccatttcttttgggaaatcgcaaggccgcctgtgtctcttgattcgtggagctgcgggaacgcggagggcgaaagatgggttcttttggcaagcttgcgaagagggctgtggagactgagatgcccgtgatggttaagatacaagaggtgattcgaggagcgaaaaatgccatgtctctagcgcagggagtggtctattggcaaccacccaagcatgcactggacaaggtaaaagagcttgtttgggagccttctattagccgttatggtgccgatgaaggtattccagaactcagagcggccttggtaaagaagttggagcgggaaaataaattatacaaatcttcagtggtggtgacttcaggagcaaatcaggcgtttgtggatctcgttctcacattatgtgacgctggtgacactgtcgtcatgtttgcaccatattactttaatgcgtacatgtccttccagatgacaggggtcactgatatactggttggtcctggcgatcctatgactctttatcctgatgcagattggttagagaaaactctatctgaaaccaaacctgtcccaaagcttgttacagttgtaaatcctggaaatccttctggcacgtacatccctgagtctcttcttaagaggatatcagatctttgtgaacaggctggtgcatggcttgtcgtcgataatacatatgagtactttatgtatgatggtcttaagcacacctgcattgaaggaaatcatattgtcaacatcttttctttttccaaagcctatggaatgatgggatggcgagttggatatatcgcatatccttcagaagttgaaggtttcgcagaccaactcctcaaagttcaggacaatatccccatatgcgcttcaatcatctctcaacatctagccctgtactccttagaagcaggacctgagtgggtcactgagcgcgtgaagactctcatcaagaacagggagatcgttgtagaagctctctctcctcttggggaaggcgcggttaaaggtggagagggcgccatttatttgtgggcgaagctgcctgatcagtttgtccaggactttgatgtcgttcgctggcttgctcataagcatgaggtcgtgactattcctgggagtgcgtgcgggtgtccggggaatctcagaatatcgttcggagggttggtggagagcgactgcagagctgctgcagagaggctgaagaggggattagaggaattggtgagggatggaatggtacagtgagtggttcgtgtagccttcgattcgaacaattggaacaattggaacattggggtctgttatccaatttgtgcctcatttgtggctggtacatcaaaataagcagtggttttatagttcttgtaaatctttatggcaaaatggtgcttcgcatacaggcttgtactgtcagacaggtttgatactacatacaggcagaaatgtttcttcattcaagaattcgaacggtatgatagccaagtttggtaagaaaaaaaaaagacattcttgaaca

SEQ ID NO: 1613 - DNA, 1438 bp, Trifolium pratense
ttttattttggtttttcacttcaaatcacaaatttggaacttgtttcttgtgttttgtttgaaaaagagagagatgggttcttatggaaatctagctagaagggctgtggaaactgagatgcctattatggttaagatgcaggaattgctacgaggagctaagaatgctgtgtctttggcacagggtgtggtttattggcaacctccaaagcaagcgttggataaggtgaaagaacttgtgtatgagccttctattagtcgttatggtagtgatgaaggtattcctgaactcagagaggcgttagtgaaaaagttgcgtaatgaaaataatttgcacaaatcctcggtaatggttacagcaggtgccaatcaggcgttcgtgaatcttgttcttactttgtgtgatgcgggggattctgtggttatgtttgccccttactacttcaatgcatacatgtccttccagatgaccggcattaccaatatactagttggtcccggtaacccggaaacactttatccggatgcagactggttggaaaaagtgttatcagaaagtaaacctgtgccgaagctagtaactgttgtaaatcctggcaacccaactggaacctacattccagagcctcttctgaagaggattgcaaatctctgcgagaaagctggctcttggcttgttgtggacaatacatatgagtactttatgttcgatgatctgaaacacacttgtgtggaaggaaatcatattgtgaatattttctctttctcaaaagcttatggaatgatgggatggcgtgttggatacatagcatacccttctgaagtagaaggacttgcttcccaacttctcaaagtccaagacaacattccaatctgtgcttcaatattttcacaacaccttgcactctactccttagaacttggacctgaatgggttaccgaacgagtaaaaactctcgagaagaacagacaaattgtcatggaggccctttccaatctcggagaaggttcaattaaaggaggtgaaggagctatatacctttgggtgaagattccaagtggacaaggttacaatgatcttgatgttgttcactggctggctaataggcatgggattgctgttatccccggaagtgcatgtggtgcttccggaaatcttagaatttcgtttggaggtttggcggaaaatgattgtagggcagcagcagaaaggcttaagaaaggtttggaagaattggttgcacatggtttggtacaagactagtaacaaaatagttcatctcaaaagagatttatagaaagaaaaatccatttgccagtggagaaaatttgcagctggtgatgcatttgaataaatgttagtatttattttcagccttgttaagctggatggtactagcaaggtttaataattttcattatgaaaaagtagataata

SEQ ID NO: 1614 - DNA, 1525 bp, Lotus japonicus
tggtgaagcgtggcgtttcatagctaatgtctttttactaggttggtccactagctcacgtttcttcttgttcaacaaatcaacccaaaagggtgcttgcttgctttgattttgtgtgagatgggttcgtacgcgaatttggctaggagggctttggaaactgagatgccgattatggttcagatgcaggaagtgcttcgaggagctaagaattgcgtgtctttggctcagggggtagtttactggcaacctccaaagccagcactagataaggtgaaagaacttgtgtgggagccttctgtcagtcgttatggtgctgatgaaggtttacctgagcttagagctgcattggtgaaaaagttgcgtcaagaaaataatttgcacaaatcctctgtaatggttacagcaggtgccaatcaggcattcgtgaatctagttcttactctgtgtgatgcgggggattccgtggttatgtttgctccttactacttcaatgcatatatgtccttccagatgactggcattaccaatatacatgtaggccctggtagcccagatacactctatccagatgtagattggttggaaagaatattaacagagagcaaacctgtcccaaagcttgtcactgttgtaaatcctggcaaccctactggaacatacattccagaatctcttctgcagaggattgcaaatctctgcaagaatgctggctcttggcttcttgttgacaatacatacgagtattttatgtttgatggtctgaaacactcttgtgtggagggaaatcacattgtgaacatattctctttctcgaaagcatatggaatgatgggatggcgggttggatatatagcatacccatctgaagtagaaggactttctgcacaacttcttaaagttcaagacaacatccccatctgtgcttcgataatttcacaacaccttgctctccactccttggaaatggggcctgagtgggtcagagaacgagtacaaacacttgccaagaacagagaaattgtttcagaggcactttcccctcttggagagggttctgtaaaaggaggggaaggtgcaatttacctgtttgcaaaactccctaaaggtggctatgatgattttgacgttgttcgctggctagctaatcggcatgggattgctgtaatcccgggaagtgcatgtggtgctgctggcaatctcagaatttcatttggaggcttgacggagagtgattgcagagcggcggcagaaaggctgaagaaagggttggaagagttggttgcaaatgggttagtgcaggacccagtgaacttctagttcatcacctcatgtccaaagaataaaaggaaacatatagaaagaaagaccatttgccagtggagcaagattgcaactggcgcatttgaataaatgtgagatttactttaagcctggttaatttgcaggtattttcattttgaattccatcattcaaagcaatggataaaaacatattcatttttctttatattgattgagttct

SEQ ID NO: 1615 - DNA, 2107 bp, Trifolium pratense
tacttgtactatagtttaatggtggatgggttggtgaagcgtggcgttgcaaagttgaatactttttgttaggttgacgttttcgttttcttcttcaacaagactacttcattgtggtttttctttttcacttcaaatcacaattttggaacttgtttcttgtgttttgtttggaaaacaaagatgggttcttatggaaatctagctagaagggctgtggaaactgagatgcctattatggttaagatgcaggaattgctacgaggagctaagaatgctgtgtctttggcacagggggtggtttattggcaacctccaaaggaagcgttggataaggtgaaagaacttgtgtatgagccttctattagtcgttatggtagtgatgaaggcattcctgaactcagagcggcgttagtgaaaaagttgcgtaatgaaaataatttgcacaaatcctcggtaatggttacagcaggtgccaatcaggcgttcgtgaatcttgttcttactttgtgtgatgcgggggattctgtggtgatgtttgccccttactacttcaatgcatacatgtccttccagatgaccggcattaccaatatactagttggtcccggtaacccggaaacactttatccggatgcagactggttggaaaaagtgttatcagaaagtaaacctgtgccgaagctagtaactgttgtaaatcctggtaacccaactggaacctacattccagactctcttctgaagaggattgcaaatctctgcgagaaagctggctcttggcttgttgtggacaatacatatgagtactttatgttcgatgatctgaaacacacttgtgtggaaggaaatcatgttgtgaatattttctctttctcaaaagcttatggaatgatgggatggcgtgttggatacatagcatacccttctgaagtagaaggtcttgcttcccaacttctcaaagtccaagacaacattccaatctgtgcttcaatattttcacaacaccttgcactctactccttagaacttggacctgaatgggttactgaacgagtaaaaactctcgagaagaacagacaaattgtcttggaggccctttccaatctcggagaaggttcaattaaaggaggtgaaggagctatatacctttgggtgaagatcccgagtggacaaggttacaatgatcttgatgttgttcactggctggctaataggcacgggattgctgttatccctggaagtgcatgtggtgcttccggtaatcttagaatttcgttcgggggtttgactgaaaatgattgtcgagcagctgcagaaaggcttaagaaaggtttggaagaattggttgcacatggtttggtacaagactagtaacaaaatagtttatctcaaaagagatttatagaaagaaaaatccatttaccagtggagaaaatttgcaactggtgatgcttttgaataaatgttaggatttattttcagccttgttaagttggatattactagcaaggtttaataattttcattatgaaaaagtagataataataataaatgcatcataaactttttttcatatcaattcatttctattagtttatggctcatctgaactttacttacctctcatctgaactccgcataatcaggaaccctcccgagaacttaagggtttcgaaagagaaaaagtgtatgcccacacgagcgcgcacacacacaatgaatagggtgttattggagtatgaacaaacaagagtactccttcacaatggtaacaacttctcaactgagttcttagactcttttactagtaatctatcaaaatgacttatcactatgtttatatgtgcgttgaatacgtgctgaatgcgccgttagcaaactcttagcatctttttgtgtcgtcgtgcttttattaatatgtctcactatctcaacctttttggttgttttttacttcaaatttatgtgtacaattgattgattttagaaaaatgttactatattgatttccctttatttttggtctggttagttttataaagaagtgaaaatgttttctttaaaaagaatttagacaaaatattactacttgagtttgtaatt

SEQ ID NO: 1616 - DNA, 1790 bp, Fragaria vesca
aagcctttcctctttatttctctgcccttttttctatgatgcaggaagagggtgttgaatatctatatatattgaaatacagaaaataggggttgtggcgttactcgctttgttaatctgtcttggaaagtggtgtttcgaacgttggagaggtgaagctttctaggttggtggaggtcttatcctttgcaaagtatagggaagactttaaaaacaaaagacttttactttctgtgtcgggaagtttcagaattttggggttccgttctgagttgggttgaagttctctgagatgggttcctgtggaaaacttgcaaagagggctgtggatactgatatgccggtcatggttcagatacaacaattgatccgaggtgccaaaaatgctgtgtcactggcgcagggagtagttcattggcaaccacccaaacaggcattggataaggtgaaagaacttgtatgggagccttcaattagtcgttatggtgctgatgaaggtatacctgaactcagggaggcattggtaaaaaagttgcgacaagaaaacaagttgtgcaaatcttcagttatggttactgcaggggcaaatcaggcatttgtgaaccttgttcttacattgtgtgatgctggagactccgtggtcatgtttgcaccgtactacttcaatgcctacatgtccttccagatgactggagttacaaatatacttgtaggtcctggtcagccaaatacactttacccagatgcagattggttggagaaaacactgtcagaaacaaaaccaaccccaaaacttgtcacagttgttaatcctggcaacccatctggaacctatattccagaacctcttcttaagaggatttcagatatttgcagagaggctggatcatggcttgttgtggacaatacatatgagtattttatgtatgatggattgaagcattcttgtgtggagggaaatcacattgtcaacatcttttctttctcaaaagcttatgggatgatgggatggcgagttggctatatagcatacccatccgaagcagatgagtttggcactcaactcctcaaagttcaagataacattcccatctgtgcttcaatactttcgcaacatcttgccttgtattcactagaaatgggatccgaatgggttgttgaacgagtgaaaggacttgtcaaaaacagagaaattgttttagaagctctctccccactcggggaagagtctgttaaaggtggagaaggtgctatatacctgtgggcgaagctcccggacaaagtcgatgactctgaatttgttcactggcttgctcacagacatggggtggttgtgattcctggaagtgcatgcgggtgccccggaaatgtgagaatctcattcggtggcttgttagaggatgactgcaaagctgctgcggggaggctgagaaaaggattagaagagttggtcaaggatggaatggtcaagtaactttcatcttacattgattcaaccatacaaatttacagctatttcaaaataattggtggggtgggtgggatctttgtttagtcaagtcatataaaagaaaataggtttatttcagttatgtataatccaaaatggcagttccaagtcccaaaatggcaaaatgtgtgtttctgttatcatagccattaattatcaaactacatgtttcagtgtccaaatataaatagtgatgctgttttatctctgctttatttgttctgaccatatatctatactggaaatgaacacacattgcctctgtaaatataatagcaaa

SEQ ID NO: 1617 - DNA, 1432 bp, Trigonella foenum-graecum
cggccggggggttttgtttttttgagtgaaaagaaagatgggttcttatggaaatcttgctaggagggctgtggaaactgagatgccgattatggttaagatgcaggaattgctacgaggagctaagaatgctgtgtctttggcccagggggtggtttattggcaacctccaaagcaagcattggataaggtgaaagaacttgtgtatgagccttcgattagtcgttatggtaatgatgaaggtattcccgaactcagagcggcattagtgaaaaagttgcgtaatgaaaatcatttgcacaaatcctcggtaatggttacagccggtgccaatcaggcgtttgtgaatctagttcttactctatgtgatgccggggattctgtggttatgtttgctccttactacttcaatgcatacatgtccttccaaatgaccggcattaccaatatactagttggtcccggtaacccagaaacactttatccagatgcagactggttggaaaaagtgttatcggaaagtaaacctgtcccaaagctagttactattgtaaatcctggcaatccaactggaacctacattcccgagcctcttctaaagaggattgcgaatctctgcgagaaagctggctcttggcttgttgtggacaatacatatgagtactttatgtttgatgatctgaaacacacttgcattgaaggaaatcatgttgttaatattttctctttctcgaaagcttatggaatgatgggatggcggataggatacatagcatacccttctgaagtagaaggacttgcttcccaacttctcaaagtccaagacaacattccaatctgtgcttcaatattttcacaacaccttgccctctactccttagaattgggacccgaatgggttacggaacgagtcaaaactctcgccatcaacagaaaaattgtcttggaggccctttcgaatctcggagaaggttctattaaaggaggagaaggagctatatacctttgggtgaagatcccaagtggacatggttacgatgattttgaaattgttcgctggctagctaatagacacgggattgctgttatcccgggaagtgcctgcggtgcttccggcaatcttagaatttcattcggagggttgacggaaaatgattgtagagcagcagcagaaaggcttaagaaaggtttggaagaattggttgcacatggtttggtacaagactagtaacaaaatagtttcatctcaaaagaaatttatagaaagaaaagtccatttgaagatggtgcatttgaataaatgttaggatttattttcagccttgttaagttggagggtatactaacaaggtttaataattttcattttgaaaagtagataaatgcatcatagacattttttcatatcaattgatttttatatgttttatgc

SEQ ID NO: 1618 - DNA, 1586 bp, Medicago truncatula
ggatttggattaaggtatagattaatggtggatgggttggtgaagagtggcgtttcaaagttgaattctttttgttaagtagggtcaccccttttgttgtggtttacgttttcttcttcaacaagacttcattggtttttgttttacttcaaatcacaaaattggaatttttttttctttggttttggtttttgagtgaaaagaaagatgggttcttatggaaatcttgcaaagagggctgtggaaactgagatgcctattatggttaagatgcaggaattgctacgaggagctaagaatgctgtgtctttggctcagggggtggtttattggcaacctccaaagcaagcattggataaggtgaaagagcttgtgtatgagccttctattagtcgttatggtaacgatgaaggtattcctgaactcagagcagcattagtgaaaaagctgcgtaatgaaaataatttgcacaaatcctcggttatggttacagccggtgccaatcaggcgttcgtgaatctagttcttactctatgtgatgcgggggattccgtggttatgtatgctccttactacttcaattcatacatgtccttccaaatgactggcattaccaatatactagttggtcccggtaacccggaaacactttatccagatgcagactggttggaaaaagtgttatcagaaagtaaacctgtcccgaagctagtaactgttgtaaatcctggcaacccaactggaacctacattccagagtctcttctaaagaggattgcaaatctgtgcgagaaagctggctcttggcttgttgtggacaatacatatgagtactttatgtttgatgatttgaaacacacttgtgtggaaggaaatcatgttgtgaatattttctctttctcgaaagcttatggaatgatgggatggcgaattggatacatagcatacccttctgaagtagaaggacttggttcccaacttctcaaagtccaagacaacattccaatttgtgcttcaataatttcacaacaccttgcactctactccttagaattgggacccgaatgggttaccgaacgagtaaaaactcttgcgaagaacagacaaattgtcatggaggccctttcttctcttggagaaggttctattaaaggaggagaaggagctatatacctttgggtgaagattccaagcggacatggctacgatgatttcgaagttgttcgctggctagctaataggcacgggattgctgttatcccgggaagtgcatgcggtgctgctggaaatcttagaatttcatttggaggcttgactgaaaatgattgtagagcagcagcagaaaggcttaagaaaggtttggaagaattggttgcacatggtttggtacaagactagtaacaaaatagtttcatctcaaaagaaatttatagaaagaaaagtccatttgccagtcgagaaaatttgcagctggtgcatttgaataaatgttaggattttattttcagccttgttaatttggagggtactaacaaggtttaataattttcattttgaaaagtagataaatgcatcatagacttctg

SEQ ID NO: 1619 - DNA, 1537 bp, Manihot esculenta
cagggggtcaaggacaattgagttaaactagagcttatccctctttctgcgagggagattcttggttgatttttgtgttgaaggaaaaaaaaaactgagatgggttcctttggaaagctagctaggagggctttggagacggagatgccggtcatggttcagatacaggaagtgatccgaggagcgaaaaatgccatgtctttggcccagggggtcgtttattggcaaccacccaaacaggcgctagaaaaggtgaaagaacttgtatgggagccttcaattagtcgttatggtgctgatgagggtatccctgaactcagggaggcattgaccctgaagttgcaaaaggaaaataaattggtgaaatcttcagttatggttactgctggtgcaaatcaggcatttgttaatcttgttcttgcattatgtgatgctggggattctgtagtcatgtttgccccatactatttcaatgcatacatgtccttccagatgacaggcgtcactaatattttagtgggtcctggtaaccggaagacacttcatccagatgcagactggttggaaaggacactatcagaaactagaccagttccaaaagttgtgactgttgttaaccctggtaacccaacagggacatacattccagagcctctcctcaagaggatttcagatctatgcagaaaagctggatcctggcttattgtagataatacatacgagtattttatgtatgatggtttaaaacattcctgcgtagaaggtgatcatattgtcaacatcttttccttctcaaaagcatatgggatgatgggatggcgagttggatatatagcatatccatcagaagtagagggctttgcaactcagctcctcaagattcaggacaatataccaatctgtgcctcattactttcacaacacctggccctctactccttagaaatgggacctgaatgggtcaccgagcgagtgaaagatctcgtgaggaacagagaaatccttctggaagctctctcccctttaggagaagatgctgtgaaaggtggagaaggtgcaatttacctatgggcaaagcttcctgacaaatatttggacgactttagagttgttcagtggcttgctacaagacatggggtggttgtgattccgggaggtgcttgtggatgcgcagggcatattaggatctcctttggaggcttgatagagtctgattgtaaagttgctgcagagaggctgaggagagggttagaagagctagtgaaccatggaataatggagtaaacgtcctacagccctttcaatattgaaatgggaaatccatttaccagccctgttcaggttaacagctggtgcgttccaataaatgcattgttcagtgaatgtttagggcatttacctggcatttgtcccaagtagaataatagttgattaaatgtacattgttaagctatttcctgaagttgcttttctgacatagtatttacgttcaatacctaatgcttgtattttatggtaataaatttagattcattgg

SEQ ID NO: 1620 - DNA, 1720 bp, Trifolium pratense
tagtttaatggtggatgggttggttggtgaagcgtggcgttgcaaagttgaatactttttgttaggttgacgttttcgttttcttcttcaacaagactacttcattgtggtttttctttttcacttcaaatcccaaatttggaacttgattcttctgttgtgtgtgaaaagaaaaatgggttcttttggaaatctagctaagagggttgtggaaactgagatgcctattatggttaagatgcaggaattgctacgaggagctaagaatgctgtgtctttggcacagggggtggtttattggcaacctccaaaggaagcgttggataaggtgaaagaacttgtgtatgatccttctattagtcgttatggtaatgatgaaggcattcctgaactcagagcggcattagtgaaaaagttgcgtgatgaaaataatttgcacaaatcctcggtaatggttacagcaggtgccaatcaggcgttcgtgaatcttgttcttactttgtgtgatgcgggggattctgtggtgatgtttgccccttactacttcaatgcatacatgtccttccagatgaccggcattactgatatacaagttggtcccagtaacccggaaacacttcatccagatgcagactggttggaaaaagtgttatcagagagtaaacctgtgccgaagctagtaactgttgtaaaccctggcaacccaactggaacctacattccagactctcttctgaagaggattgcaaatctctgcgagaaagctggctcttggcttgttgtggacaatacatatgagtactttatgttcgatgatctgaaacacacttgtgtggaaggaaatcatgttgtgaatattttctctttctcaaaagcttatggaatgatgggatggcgtgttggatacatagcatacccttctgaagtagaaggtcttgctgcccaacttctcaaagtccaagacaacattccaatctgtgcttcaataatttcacagcaccttgcactctactccttagaactgggacctgaatgggttactgaacgagtaaaaactctcgctaagaacagacaaattgtcttggaggctctttccaatgttggagaagtttcaattaaaggaggtgaaggagctatatatctttggctgaagatcccgagtggacaaggttacgatgattttgaagttgttcactggctggctaataggcacgggattgctgttatccctggaagtgcatgtggtgcttctggtaatcttagaatttcgttcgggggtttgactgaaaatgattgtagagctgcagcagaaaggcttaagaaaggtttggaagaattggttgcacatggtttggtacaagactagtaacaaaatagtttatctcaaaagagatttatagaaagaaaaatccatttaccagtggagaaaatttgcaactggtgatgcttttgaataaatgttaggatttattttcagccttgttaagttggatattactagcaaggtttaataattttcattatgaaaaagtagataataaatgcatcataaccttcttttcatatcaattcatttctataagtttttggctcgtgacacacgtgtacacacacacatgtgcacaatccttgttgaacaatttttatacaaactttacttacctctcatctgaactcagtatagtcaagaaacctcttgaaaacttaagggtttagaaag

SEQ ID NO: 1621 - DNA, 2007 bp, Populus trichocarpa
gtacaaactacgaagacttgagtagagaggatggcatcttttgtgttagataatagttggggttgttgaagcctgcctaactcatcttcataacccaatcttttctttttctaccttataaaagcaaaacccatcgttctcccttggccattttataagaaaaacgttgaaaaatttggggttaaagggattttgggttggtggttgtaggagaattgcgctgaatcagagttcatttgtgggatttttgtgagatattcttggttggttctggtctgaaagggaaaaggagagatgggttcctatgtaaagcttgctaagagagctgtggagactgaaatgcctatcatggttcagatacaggaattggtccgaggagcgaaaaatgctgtgtccttggcccagggagtagtttattggcaaccacccaaacaagcattgaataaggtgaaagaacttgtatgggagccttcaattagccgttatggagctgatgaaggtattcctgaacttagggaggcattgacacagaagttgcaaaaggaaaataagttggtgaaatcttcagtcatggttactgcaggtgcaaatcaggcattcgtaaatcttgttcttgcattatgtgacgctggggattctgtggttatgtttgctccatactatttcaatgcatacatgtctttccagatgactggcgtcactaatatactggtgggtcctggcaacccagagacacttcatcccgatgcagactggttagagagaacattatcagaagcaaaacctgttccaaaggttgtcacagttgttaaccccggcaacccaagtgggacctacattccagatccccttcttaagagaatttcagatctatgcagagaagctggatcctggcttattgtagataatacatatgagtattttatgtatgatggtctaaaacactcgtgtatagaaggagatcacgttgtcaacatcttttccttctcaaaagcatatggaatgatgggatggcgagttggatatatagcatatccatcaggagtggaaggctttcaaactcaacttcttaaaattcaggacaacataccaatctgtgcttcaatactgtcacagcaccttgctctctattccttagaaatgggacctgaatgggtgaccgagcaagtgaaagatctcgtcaagaacagggatataattctggaagcactctcccctctgggcgaaggtgctgtgaaaggtggagaaggagcaatttacctatgggcaaagcttccagagcaatacgtggatgatgataaagttgttcgctggcttgctacaaggcatggtgtcattgtgattccaggaggtgcgtgtggatgtcccgggcaccttaggatctcatttgggggcttgacagagaatgactgtaaagctgctgcagagagactaaggagaggactggaagatttggtaagcaatgggattgtgcagtgacactcagcccttttcttctctgaatacattaaaaaatggaagtcagatggggcagattggcgcaaggttttacgacgggcgtttgtgcatgcattggaataataggagggtggtgaattaattctatgtttttaggctgatagttatgttgtgaacaaagggaaggtactttatcggcgccggcacattggccattgatgtctaaagtaacagacgcggagtggttttttataatatatagcaatactacttagttaagtacagcgttacgctcctgcagattgaatttcaaattaatttttaacatgataattcaatatgagaatttttaaacaagaattgaaaagcttatgttatgttgaattgaaaactatatgataataaaaggagttaactacaaattaagagctgtttatctttattgtaaggagcaaaaatacgtttatatgtaagtattttatctaatgtcttggggtgctctatgaatttttttttatttagttatatctcaataaaaatagattttta

SEQ ID NO: 1622 - DNA, 1623 bp, Prunus persica
agagaagtgtcaaacgttgtgagggtggaagctttttgggtaggtggaggtcttatcctcgaagcaaaaaaacaaaaagcttttatttttctctcttcttctcttcattgccttctgggaaagtttcagaatttgggttttgaggagggtcaagaattgggttgcatagctatattttggagatcatttgtgagggttgggtttggttggcgagatgggttcatatggaaaacttgcaaagagggctgtggagactgagatgccgatcatggttcagatacaacaattggttcgaggagccaagaatgctgtgtcactggcccagggagtagttcactggcaaccacccaaacaggctttggataaggtgaaagaacttgtatgggagccttcaattagtcgttacggtgctgatgaaggtatacttgaactcagggaggcattggtaaaaaagttgcataatgaaaataagttgtacaaatcttcagtgatggttacttcaggtgcaaatcaggcatttgtgaaccttgttcttacattgtgtgattccggggactctgtggttatgtttgcaccatactacttcaatgcctacatgtccttccagatgaccggcgtgactaatatattggtgggtcctggccacccagagacactttacccagatgcagactggttggagaaaacgttatcggaaacaaaaccaaccccaaaacttgttacggttgttaatcctggcaacccaagtggaacctatattccggaccctcttcttaagaggatttcagatatttgtagagacgctggatcatggcttgttgtggataatacatacgagtattttatgtatgatgatttgaaacacacatgtgtggagggaaatcacatagtaaacattttttccttctcgaaagcttatgggatgatgggatggcgagttggatatatagcatacccatcagaagtagagggttttgctacccaactcctcaaagttcaagataacattcccatctgtgcttcaataatttcacagtaccttgcgctccactcattggaaatgggacccgaatgggtcactgaacgagtgaaaggtcttgtcaagaataaagaaattgttctagaagcgctttcccctctcggaaaagatgctgttaaaggtggagaaggtgctatatacttgtgggcaaagcttccggacaaatatgcagatgacgataaatttgttcactggcttgctcacaggcatggggtggtggtgatccccggaagtgcgtgtgggtgcccaggaaatgtgagaatctcctttggtggcttgctagaggatgactgcaaagctgccgcagaaaggctgaggagagggttagaagaattgatcagagatggaatggttcagtaactttaactattgcatttaattcaacattgaaaatggaagtccatttgccagtttacacaagtttgaaactggttctttagaataatggagggtctgctgcaagcaaaagaattagagtaatttcaatgaagtaggcaatgcctaagttctaacatgtgcttgtattgttattgtacacattgatctttaaaatacatgcaatacatggttcaaatgttcacata

SEQ ID NO: 1623 - DNA, 1640 bp, Fagus grandifolia
catttttaatgagtatttttacaaggagagctacatctaatagtaaatagtgggggttgttgaaggcgtgtggaacttgaactttgtagttattctaagaaaaagcttaaaagctattaccttgtttgctttgtgttttaagtttctcagaaaagcttcaaaattttggggactagggagcttttggttaggtgggtcttgatctatatcactaaatagtttctgggtaaggtttagaatctgggtttggggcttttagtttggtgggttgtgtaaaaaactgtgcattttgatataaattggagctcattgtgagggttttttttggctgtggctggtgaagttgctgtgagaaggagggtgagatgggttccaaatttaagcttgctaaaagggctttggagactgagatgccggtcatggttcagatacaagaactgatccgaggagccaaagatgctgtgtctttggcccagggggtagtttattggcaaccacccaaacaggcattggatagggttaaggaacttgtatgggagccttcaattagtcgttatggcgctgatgaaggtattcctgaactcagggaggcattgatcaaaaagatgcgtctagagaataaactgcacaaatcttcagtgatggttactgcaggtgcaaatcaggcatttgtaaatcttgttcttacattgtgtgatgctggggattctgtcgttatgtttgcaccatactacttcaatgcctacatgtccttccaaatgactggcatcactgatatactggtgggtcctggtgaccccaagacactttatccagatgcagactggttagaaagaacgttgttggaaactaaaccagccccaaagcttgttactgtagttaatcctggcaacccaactgggacttacattccagagcctcttcttaagaggatttcagatctctgcagagatgctggatcttggctcgttgtagataacacatatgagtacttcatgtatgatggtctaaaacacacatgtttggaggcaaatcacgtagtcaacattttttccttctcgaaagcttatggaatgatgggatggcgggttggatatattgcatacccttcagaagtagatggctttgcagctcaactcctcaaagttcaagacaacattcccatctgtgcttcaataatttcgcaacatcttgccctttactccttggaaatgggacctgagtgggtcactgagcgagtaaaagatcttgtcaagaacagagaaattgtttagaagcactctcacccctcggagaagatgctgtgagaggaggagaaggtgcaatatacctgtgggcaaagcttccagaaaaatatgttgatgacttcaaagttgttcactggcttgctcataggcatggagtggttgtgatcccgggaacctcatgtgggtgtccggggaacttgaggatctccttttggaggattgatagagagtgattgtaaagatgctgcagaaagactgaagagagggttcgaagaattggtcagagatggaatggtggtgtaactattttttcaggaattcaaacatgaattgaagtacattggattgaataattgagcttctgaatagagcagtaatctgtatgtatattac

SEQ ID NO: 1624 - DNA, 3657 bp, Theobroma cacao
tttggctcatggaaattaatttaattgatgtctccttgaggaagcttcaacgaaagtgggggaaagaagagttttctgaagatgggttcttatggaatgcttgccagaaggattgtagagactgaaatgccagtcatggttcagatacaggaattgatccgaggagctaaaaatgctatgtcacttgctcagggagtagtatactggcaaccaccgaaatgggctttggataaggtcaaagatcttattgaggagccttcaattagtcgttatggtgctgatgaaggtcttcccgaacttagagaggcattgataagaaagttgcgtcaagagaataatttgcgcagatcttcagtgatggttactgcaggtgcaaatcaggcatttgtaaaccttgttctaacgttgtgtgatgcgggggattctgtagtcatgtttgccccatattatttcaatgcctacatgtcgttccagatgacaggtgtcactaagatactggtgggtcctggttacccaaagactctttatccagatgcagactggttagaaaagacattgctggaaactaagcctgttccaaagcttgttactgttgttaatcctggcaacccatctgggacctacattccagagccactacttaagaggatctcagatctatgcagaaatgctggatgctggctggttgtagataatacatatgagtactttatgtatgatggtctaaaacactcttgcatagaaggaaatcacatagtcaacatcttttctttctcaaaagcctatgggatgatgggatggcgagttggatatattgcttaccccacagaagtggagggccttgcaacacaacttctcaaagttcaagacaacatacctatttgtgcttctatcatttcacagcgccttgcccttcactctttagaagtgggacctgaatgggttcttgaacgagtcaaagatcttgtcaagaatcgagaaatagttgtagaagcactctcaccattgggagaaggtgctgtaaagggtggagaaggtgcaatttacttgtgggcaactctaccagagaaatatgttgatgatgtcaaggttgttcactggcttgctaacaggcatggggtggttgtgatcccaggaactgcatgtgggtgcccagggcatttaagaatttcctttggtgggctgatggaggatgactgtagagcagctgcagagaggctgaagagaggattaggagaactggtgaaagatggaatggtgcagtaactgtatttaacatttaattgaaatacagaatcaggtacattgaccagttcaagttttagaactggttcatttgaataattggagggtgtctacctgctaagtcgctcaaattagagctgcagcttcagttatgtgtattgggaaagtactttcacagatgcatgtataaattgtgcacattgatgattaatacatgcgaactctttatagttttctgaagtgcccattccatttaaactccgaagtagtcttacatgtcgggaataacattcaattataacattgtgtcgaactccagaaggtgctgctactctactctgcctaggttctgacacaaataatagttgatgctcagaaagctgatcaatcttcttattctttggggactatgcatctttgatggaggctcactttcatttttgcattctcgagtcgtaatttcatagtttcttttcacatggacagcatttggtttgtgtttctagaacagcagcatgttcttggaaaagtttgcgcgaggtgaaacattcttatctgatgaactagattgctaggtaaatgcaactgagccagggcacggtatgtgaaacccatcagtccaggacgacaaggtgcttgcttcacatgctctgtcaaggttttttggtgggattggtaggagagtgtatccttagacctggggttgaaggggtggtgcacggtttaaactcacctcaaggacctcaactgcactagtttatgtctccatattatgacccctttatgtaaagatttgttactgtttctgttttctcagctcagctgtcagcgtcctagactcctgtttctcatttttcaaccgttttgtgttgtgtttgttctttgtactttttactttacgccaatcccatccttttgtcactccaactcaaacgcgaaaagggaatcagatttgaggaaaatgaatcgcaccggacagatttgggttccggatgggcccctcatcagctcaacttccgtttttgggttcaccctaaccaacagcctaaagctctgtaagaaagcccaaaattacatggggctgcaattgtaatttcgtcctttcctccccacactgactctccctccctccgcgccgtttaaacgtcgccgtcggggctctcttttccacccaactaaacggaaagcagccaagaaaaaaaaaaaaggaaagatttttgttcttcaaataaaaaaccctagaatttggcagattgtttttttttttgttttttggattttggacttagatggtgaaatcaaaatggtaggaaattcgctagctggattgcaagatcacttgaaattggctcgagaatacgctcccgaaggcctctacgacacttccattatcttcttcgatggcgccattgctcattgctcagatcaacaaaaagctctatcggaggagatagaagttgtgaagcaattggatgtggaaagaaggtcatttaaggaaggttctactggaaggcgtccttcttctccaccgattcatgctatgtcctcttttgtattccaaccattagatgagtactggacttcattaggtgccccaatggataaccctgatgtgtggaggcctccaagtcaggacactacaagtagaagacctgtgagggctggtgaagctggtggctcaagtagaactaacacaggggtcagagcatctgccactgggaagaaggacactggttctgggaaatctagcaaagaagactcagcaaatggtgatgctgaagatggaaagtcaaagaggttgcagtatgagggacctgatccagatttggctgcaatgctggaaagggatgttttagaaaccactcctggagtgcagtgggatgatgttgcaggtttgactgaagcaaaaaggcttttagagaaagcttttgttcttcctttatggatgcctgaatattttcaggtggcccctgatgtggatattgataaagtggcttgtcgaacagagggatagtggggatgacctcacaaatgtttgtcgcgatgcttccttgaatggaatgaggcgtaaaatagctggaaagacgtgggatgagattaggaacatgtcccaagatgagatttcaaaggatccagttgcaatgtgactttgaagaagccttggagaaggtccagagaagtgttactcaagctgatattgagaagcatgaaaagtgatttaccgaatttggatcagcataaggggaattgaaagcctttttgaggatgatatattgtttgctttcctgatatgtttatcaaaagggtgttcatcgttatttcttatttttgtttgtgcttttgaaagtgtctgattgtttgtaatcagagtgtgacgagaattgttacgatgttgtgctatttgtatctgta

SEQ ID NO: 1625 - DNA, 1913 bp, Trifolium pratense
cgttttcttcttcaacaagactacttcattgtggtttttctttttcacttcaaatcccaaatttggaacttgattcttctgttgtgtgtgaaaagaaaaatgggttcttttggaaatctagctaagagggttgtggaaactgagatgcctattatggttaagatgcaggaattgctacgaggagctaagaatgctgtgtctttggcacagggggtggtttattggcaacctccaaaggaagcgttggataaggtgaaagaacttgtgtatgagccttctattagtcgttatggtaatgatgaaggtattcctgaactcagagcggcattagtgaaaaagttgcgtgatgaaaataatttgcacaaatcctcgggagtggttacagcaggtgccaatcaggcgttcgtgaatcttgttcttactttgtgtgatgcgggggattctgtggtgatgtttgccccttactacttcaatgcatacatgtccttccagatgaccggcattactgatatacaagttggccccagtaacccggaaacacttcatcaagatgcagactggttggaaaaagtgttatcagagagtaaacctgtgccgaagctagtaactgttgtaaaccccggcaacccaactggaacctacattccagactctcttctgaagaggattgcaaatctctgcgagaaagctggctcttggcttgttgtggacaatacatatgagtactttatgttcgatgatctgaaacacacttgtgtggaaggaaatcatgttgtgaatattttctctttctcaaaagcttatggaatgatgggatggcgtgttggatacatagcatacccttctgaagtagaaggacttgctgcccaacttctcaaagtccaagacaacattccaatctgtgcttcaatattttcacaacaccttgcactctactccttagaacttggacctgaatgggttaccgaacgagtaaaaactctcgagaagaacagacaaattgtcatggaggccctttccaatctcggagaaggttcaattaaaggaggtgaaggagctatatacctttgggtgaagatcccgagtggacaaggttacaatgatcttgatgttgctcactggctggctaataggcacgggattgctgttatccctggaagtgcatgtggtgcttctggtaatcttagaatttcgttcgggggtttgactgaaaatgattgtcgagcagctgcagaaaggcttaagaaaggtttggaagaattggttgcacatggtttggtacaagactagtaacaaaatagtttatctcaaaagagatttatagaaagaaaaatccatttgccagtggagaaaatttgcagctggtgatgcatttgaataaatgttaggatttattttcatccttgttaagttggatgctactagcaaggtttaataattttcattatgaaaaagtagataataataataaatgcatcataaactttttttcatatcaattcatttctattagtttatggctcatctgaactttacttacctctcatctgaactccgcataatcaggaaccctcccgagaacttaagggtttcgaaagagaaaaagtgtatgcccacacgagcgcgcacacacacaatgaatagggtgttattggagtatgaacaaacaagagtactccttcacaatggtaacaacttctcaactgagttcttagactcttttactagtaatctatcaaaatgacttatcactatgtttatatgtgcgttgaatacgtgctgaatgcgccgttagcaaactcttagcatctttttgtgtcgtcgtgcttttattaatatgtctcactatctcaacctttttggttgttttttacttcaaatttatgtgtacaattgattgattttagaaaaat

SEQ ID NO: 1626 - DNA, 1587 bp, Malus domestica
ttgcgtgggggtgaaagcttattggttaggtggggacattctatccttgaagctaaagaacaaaaccttttggggtttcttgttctttctcttggactggatttctgggaaagtttcagaatttgtattggagatcatttttttgggcgtttggtttggttggtgagatgggttcctatggacaacttgcaaggagggccgtggagactgatatgccgatcatggttcagatacagcagttggtccgaggagccaaaaatgctgtgtcattggctcagggagtagttcactggcaaccacccaaagaggcattggataaggtgaaagaacttgtttgggagccttcaattagtcgttacggtgctgatgaaggtttacctgaactcagggaggcattagtacaaaagttgcatcgtgaaaataagttgtacaaatcttcagtgatggttactgcaggcgcgaatcaggcatttgtgaaccttgctcttacattgtgtgatgccggggactctgtggttatgtttgcaccatactacttcaatgcctacatgtccttccaaatgacgggagtcactaatatactcgtgggtcctggtcacccaaagacacttcacccagatgcagactggttggagaaaacattatcagaaaccaaaccaaccccaaaacttgttacagttgttaatcctggtaacccaagtggaacctacattccggattctcttcttaagaggatttccaatttatgcagagatgctggatcatggctagttgtggataatacgtatgagtattttatgtatgatgatttgaaacacacatgtgtggagggaaatcacatagtcaacattttttccttctcgaaagcttatggaatgatgggatggcgtgttggatatatagcttacccatcagaagtagagggctttggtacccaactcctcaaagttcaggacaacattcctatctgtgcttcaataatttcacagcaccttgccctccactcattggaaatgggacccgaatgggtcattgaacgagtgaaaggtctagtcaagaacagagaaattgttctagaagctctctctcccctcggggacagtgctgttaaaggcggagagggagctatatacttgtgggcaaagcttccggacaaatatgcagatgatgataaatttgttcactggcttgctcacaggcatggggtggtggtgatccccggaagtgcttgtgggtgcccggggaatgtgagaatctcctttggtggcttggtagaggatgactgcaaagctgctgcagaaaggctgaggagagggttagaagagttgatcagagatggattggttgagtaacttcgattgttacattcaatttgactttaaaaacggaagtcaattttccggtttttacaagtttgcaactggttttttggaataatggagggcctcttttctgcctgcagaggaattagagtaatttcagtgatgcataattcaaagaggcaatgccaagctctaacatgtgcctgtattattgtacacattgatcttcaaaatacatgcacatatattattccaaatgttcaca

SEQ ID NO: 1627 - DNA, 2058 bp, Prunus mume
atttaaatacagaaaaagaaagagcttttattttattttatttgcctaactaaagtccatccaggcaaaagtgaaaacggtggatttcttttccggcagagctaaaaggtaaaagaaaatgagattattcatcaagcaggagacaaaagcaagtcaaagaaacgtaccaaaaataccatgcgcaactcagtatctgttttctgaaagtgaacagagaaaagaaaaagaaataaaagtaaaagaaaagcgtttggtataattgccttatctttttcggactgtttattatgcagagagaggaattataatacgcaattggggttgttgacgcgtgcagacatggtctcctctcttagctgataaacgttacctactttgttaacgtattgatagagaagtgccaaacgttgtgagggtggaggctttttgggtaggtggaggtcttatccttgaagcaaaaaaacaaaaagcttttatttttatctcttcttctcttcattgccttctgggaaagtttcagaatttgggttttgaggagggtcagtaattgggttgcatagctatattttggagatcatttgtgaggattgggtttggttggctagatgggttcatatggaaaacttgcaaagagggctgtggagactgagatgccgatcatggttcagatacaacaattgtttcgaggagccaagaatgctatgtcactggcccagggagtagttcactggcaaccacccaaacaggctttggataaggtgaaagaacttgtatgggagccttcaattagtcgttacggttttgatgaaggtatacttgaactcagggaggcattggtaaaaaagttgcataatgaaaataagttgtacaaatcttcagtgatggttacttcaggtgcaaatcaggcatttgtgaaccttgttcttacattgtgtgattccggggattctgtggttatgtttgcaccatactacttcaatgcctacatgtccttccagatgaccggagtcactaatatattggtgggtcctggccacccagagacactttacccagatgcagactggttggagaaaaccttatcggaaacaaagccaaccccaaaacttgttacggttgttaatcctggcaacccaagtggaacctatattccggaccctcttcttaagaggatttcagatatttgtagagacgctggatcatggcttgttgtggataatacatacgagtattttatgtatgatgatttgaaacacacatgtgtggagggaaatcacatagtcaacattttttccttctcgaaagcttatgggatgatgggatggcgagttggatatatagcatacccatcagaagtagagggttttgctacccaactcctcaaagttcaagataacattcccatctgtgcgtcaataatttcacagcaccttgcgctccactcattggaaatgggacccgaatgggtcactgaacgagtgaaaggtcttgtcaagaataaaaatattgttctagaagcgctctcccctctcggaaaagatgctgttaaaggtggagaaggtgctatatacttgtgggcaaagcttccagacaaatgtgtagatgacaataaatttgttcactggcttgctcacaggcatggggtggtggtgatccccggaagtgcgtgtgggtgcccaggaaatgtgagaatctcctttggtggcttgctagaggatgactgcaaagctgccgcagaaaggctgaggagagggttagaagaattgatcagagatggaatggttcagtaactttaactattgcatttaattcaacattgaaatggaagtctatttgccagtttacacaagtttgaaactggttctttagaataatggagggtctgctgccagcaaaagaattagagtaatttcaatgaagtaggcaatgcctaagttctaacatgtgcttgtattgttattgtacacattgatctttaaaatacatgcaatacatggttcaaatgttcacatatatatggtcatatatttcttttccttttgtttgaactatttctgc

SEQ ID NO: 1628 - DNA, 1267 bp, Castanea mollissima
aggagggtaagatgggttcgttcggaaggcttgcaacgagggctgtgaagactgagatgccggtcatggtacaggtacaggaactgcaacgaagataccaaaatgctgtgtctttggcccagggggtagtttattggctaccacccaaacaggcattggagagggccaaagaacttgtatttgagccttcaattagtcgttatggtgctgatgaaggtatccctgaactcagagaggcattgataaaaaagatgcgtctagaaaataaactgaacaaatcttcagtgatggttactgcaggtgcaaatcaggcatttgtaaatcttgttcttacattatgtgatgctggggattctgtcgttatgtttgcgccatactacttcaatgcttatatgtccttccaaatgactggcatcactaatatactggtgggtcctggtaaccctaagacacttcatccagatgcagattggttagaaagaacgttgttggaaactaatccacccccaaagcttgttactgttgttaatcctggcaacccaactgggacttatattcccgagcctcttcttaagaggatttcagatctctgcagagatgctggagcttggcttcttgtagataacacatatgagtacttcatgtatgatggtctaaaacactcatgcctggagggaaatcacatagtcaacattttttccttctcgaaagcatatgggatgatgggatggcgtgttggatatatagcataccctacagaagtagagggcttggctgatcaactcctcaaagttcaggacaacattcccatctgtgcttcaataatttctcaacgtttagccctttactccttggaattggggcctgagtgggtcactgagcgagtaaaagatcttgtcaagaacagagaaatagttttaaaagcactctcaccccttggagaagatggcgtgagaggaggagaaggtgcaatatacctatgggcaaagcttccagatcaatatgttgatgacttcaaagttgttgactggcttgctcgcaagcatgaagtgcttgtgatcccgggaagctcatgtggctgtccagggaaccttaggatttcctttggaggcttgattgagagtgaatgtcaagctgctgcagaaagactgaggagagggttagaagaattggtcagagatggcatggtggggtaactataatttttaaggttaattcaaaacgtcaaaattggaagtacattttgcatttgaataattggaccctt

SEQ ID NO: 1629 - DNA, 1341 bp, Echinacea purpurea
tatagatacagaaatagcagaagaagaaatgggttcgtatggaatgttagcaagaagggctgttttgactgaaacaccggtcatggttcagatacaagaattgcttcgaggtgtcaagggtgctatatccctggctcagggcgttgtgtactggcaaccacctaaaccagccttagagaaggtgcaagaacttgtgtgggagccttcaattagtcgttatggtgcagatgaaggtcttccagagcttagggaagcattgactaaaaagttgcttgaagaaaataacttatgcaaatcttcagtgatggtaactgcaggagcaaatcaggcgtttgtgaacattgttcttgcactctgcgatgctggggattcggttgttatgtttgcaccgtactacttcaatgcttacatgtcattccagatgacaggtgtcactgacattcttgtgggtcccggtcatcctgatacgcttcatccggatgcagattggctagaaaaaactttgcgggaaaccaagccaacaccaaaacttgttacagtcgttaatcccggaaacccatctggaacttacatcccagaaccccttctgaagaaaatatcagatatctgcaaaaaggctgggtgttggcttgttgtagataacacatatgagtattttatgtatgatggtttgaagcatgcttgtattgagggaaatcacattgtcaacattttctctttctcaaaagcttatggaatgatgggttggcgagttggatatatagcatttccttcagaagttgatggttttgcttcacaattactcaaaatccaagacaacatacccatatgcgcttcaataatctcacaaagactagctcttcactcgatggaagtggggtcacagtgggtcacggatcaggtcaaagatctggtcaagaaccgccaacttcttgttgatgcattatcaccattaggtgagggtgcagtcaaaggtggagaaggggccatttacttgtgggccaagttacccgagaagtttattgacgactttgcagtggttcgttggctcgctaacaagcatggtgtggttctaatcccgggcagctcttctggatgcccgggtcatgttaggatctcgtttggtggtttggtggagaatgattgtaggcttgcatctgagaggttgaagaaagggttggaagaattggtcagagatggaatggtttgactttgatctctattccctagtgttattcgaaatgttgtggttcgataccgaaactcaaaatttgcaaaaaaggttgaatttttacaataactagaaactttctgctgatactaaagaaggtcttcttttta

SEQ ID NO: 1630 - DNA, 1672 bp, Euonymus alatus
ttccaattgatctcccagctagaattcataaaaagaagaaaattcttaatagtattctcagagactatagatagatagcaacggtgttggtggaggttgttagaactccgcctaactcaatcaaaaggtacctcctttggtttttctcaaatttctgtgaaagtttgccgtagtgttggagggcctttggtgggtggcttaacgagattcggggtttctgagattattttctaagtgggtattggtttcagaggacgaagagagatgggttcttatggaaagcttgcaaggagggctgtggagactgatatccctatcatggttcagatacaagaattggccagaggagccaaaaatgctgtctctttggctcagggagtagtatactggcaacctcctaaacaggcacttgataaggtgaaagaacttgtatgggagccgtcgattagttgctacggttctgatgaaggtattctacctctcagggaggctttgaccaaaaagttggaacagcaaaataagttgttcaaatcatcagtgatggttactgcaggtgcaaatcaggcatttgtaaatctcgttctcacattgtgtgatgctggggattcagtagttatgtttgctccatactacttcaattcctacatggccttccagatgacaggtgtcacaaatatattggtgggtcctggtcaccctgatacgcttcatccagatgcagactggttggagaaaacattgtcagaaactaaacctgtcccaaaggttgttagtgttgttaatccgggcaacccctcaggaacatacattccagagcccttacttaagaggatttcagatctatgtaagctagctggatcttggcttgttgtagataatacatacgagtattttatgtatgacggtcggaaacacacttgcctcgaagggagtcacatagtcaacattttttccttctcaaaagcctttggaatgatgggatggcgagttggatatatagcatatccaacagaagtggaaggctttgctgctcaacttctcaaagttcaagataacataccaatctgcgcctcgataatttcacagcatcttgctctacactccttggagatgggacctgaatgggtcactgaaagagtgaaggaccttgtcaagaacagagacattgttctggaagcactctcccctttgggagaaaatgctgtgaaaggcggagaaggtgcaatttatttgtgggccaagcttccagacaagtatattgaagactctaaagtagttcactggctcgctacaaagcatggagtggtggtaattccaggaggagcatgcgggtgtccggggcatatgaggatttcatttggaggcttgagagaagaggactgcaaagctgctgcagaaaggctcaggagaggcttggaagaattggtgaaagatggaatggtggagtaactaattgcttacgacataattgaaatgcaggtctacaacctaataagctgtctgaaattagaatcatagtttcagtcatgtatattggacaagctacttcacagatgcatgcatgatttacactttgaaattgattatacagtgcagcaaagtgtttaaagacgacagaagtagtttacattgtgtaaaccagttaagttgaataagagaatcatcagtttat

SEQ ID NO: 1631 - DNA, 1423 bp, Flaveria ramosissima
ggtctgtctttttattatataacttttacttagattctcatccttcaagcagataaaaagggccaatttttatagcatgccatcgtttcttgatcatcataataaagttagggatttttgatttgatagtcatccccttttctcttatatatagagagagagatagagatacacacagaaatagacagaggaagaaatgggttcgtatggaatgttagcaaggagggttgtgttcaccgaaacaccggtgatggttcagatacaagaattgcttcgaggtgtcaagggtgctatatccctagctcagggtgttgtgtattggcaaccacctcgaccagctttagagaaggtgcaagaacttgtatgggagcctgcaattagtcgttatggtgcagatgaaggtcttcctgagcttagggaagcattgactaaaaagttgcgagaagaaaataagttatgcaaatcatcagtgatggtcactgctggtgcaaatcaggcatttgtgaatattgttctcactctgtgtgatgctggggattcggttgttatgtttgcaccatactacttcaacgcgtacatgtcattccaaatgaccggtgtcaccaacattcttgtgggtcctggtgatccaaatacacttcatccggatgcagattggctagaaaaaactctgcgggaaaccaaaccgacaccaaaacttgttacagttgttaatcctgggaacccatctggaacttacatccctgaaccccttctgaagaaaatatcagatatctgcaaaaatgctggatgttggcttgttgtagataacacatacgagtatttcatgtatgatggtttgaagcattcttgtatcgagggaaatcatattgtcaacatcttttccttctctaaagcttatgggatgatgggttggcgagttggatatatagcatttccttcagaagttgagggttttgcttcagaattactcaaaatccaagacaacatacccatatgtgcttccataatctcacaaagactagcccttcactcgatggaagtgggttcacaatgggtcacggatcaggtcaaagatcttgtcaagaaccgccaacttcttgttgatgcattatcaccattaggtgagggtgcagtcaaaggtggagaaggagccatttacttgtgggccaagttacccgaaaagtttactgatgactttgaagtggttcgttggctcgccaataagcatggtgtggttctaatcccgggaagcccgtgtgggtgcccaggtcatgttaggatctcgtttggtggtttgatggagaatgattgtcggcttgcatccgagagattgaagaaagggttggaagaactggtcaaagatggaatggtttgactttgatctctagtgttgtatgaaatgttgtggttcgatactcga

SEQ ID NO: 1632 - DNA, 2413 bp, Glycine max
cttccttcacacacctcgccggcggctgcgatgaccgactatttctccggttccgttgaattcggactcaacctctctaagcgagtatactacggcaaaggatcggctccgtcgcctgcgccggcgatgtcgcggtccctttcgaagtcgccggaaggatacctcccgacggcgccgatgtgctacgccgtgatatcggatccggagaaggtggagaatccggacattcggagctaccagccgtacgtgctcggtcagtgcgagcctccggcgctgataccgctggagcttcacggcgtgggcatggaagttgaatgctccttggacacggcgttcgtaacggtctccgggaagtggcgcgtgcattgcgtgacagcaagtagtacgtgtgattgccaggttgccatacctataggtgaagagggttcacttctaggtctagaggttgatggttctggaaaatcttatcatactgaattgatctctctgaaagacgaaaaggataaggataaagtggccaaagctaaagacggatactttgtgaaaagccatatatacaccgttaagattccacagtttaggggtggctctgtcttctcaattaagatcagatggtcacagaaaatattatttcatgatggccagttatctctctgtgtccctttcagctttccctcatacgtcaaccctgctggaagaaaaatttctaagaaagagaagatatttttgaaagtgaattctggtgctacaacggaagtgttatgcaaaaccaccagtcatccctttaaggaactactgcgccaagctggcaaattaaatttatcatatgaagcagaagtgcctgcatggtcaagtacagacttaagtttttcgtactctgtttcttccaatgacatatttggagcagttctcttgcaatctccattcctgcgtgattttgacgaaagagagatattttgcttgtatctttacccgggaaacagcccggatagaaaggtttttaaaaaggatgtggtgtttgtagtagatataagcgcaagtatgaagggaactcctcttgataacactaagaatgcgctactgacatcactctctcaactaagtgcacaagatacatttaacattatagctttcaatgggacggtttacttattttcatcatcaatggaaagagctacagaggaagcaattttaaatgctaccacgtgggttgacaccaattttattgctaatggtgacactaatatcatgcttcccttaacacaggcaatgaagctacttgagaaatcaactgattcggtccctcttatttttctcgttaccgatggggctgttgaggatgagagagatatatgcaattttgcgaaaagctatgtctcaagtgggcaattggttcgaacacctcgcatatatacttttggcataggtctatattgtaatcactacttcctgcaaatgctagcacaaattgggaggggccactatgattctgctcatgatttagattcaattgactttagaatgcaaaggctattcagtacagcttcatcagttatggttgctgatataacaatcaaaagtttagaaggtcttgattcacttgagttattcccaactcatatacaagatatatcatttgaaagtccgttgatcctatcaggaagatacagtggaacttttcctgaattagttaaagtcactggtactttggcaaataagactaacttcgtagtaggccttaaagtgaaaagagaaaaggatatgcagctcagtaatgtcctttcaaagagacatatagaccaggtcactgctcaagcatggttgttaaaaagtgaagagctggaggagaaggtcactaaaatgagcattcaaaataaagtcccgtcagagtatacctgcatgaacatggttcttgtacagagtgatgaagggaagaagacacctgaacaatttctgttacaaaaggcatacaacaaacttagcttccagaagttggaactcaacaaccagaacttatttcttggagggttgagtcttggatttggtgacttgaaagcaacagctgagaatttgccaccagctataaaagaagcaaaaccacctgaaggactactggggagggctgcttcgaattgctgtggtcgattggctgatacctgttgtggcatgtgtctgttgcagacttgcacttttgtcaatgaccagtgcaccatcgtttgcactcagatttgtgcagccctggcctgttttgagctaatcaaatgctgtgttgagctctgcgagtgtgattgtttgcagtgaaataaagttatatgcttaagttaaacatagaaaaactatttgatattacaaattgttaacaatgtatatattattattatataagctctcgtgctatgctgattacaactta

SEQ ID NO: 1633 - DNA, 2674 bp, Phaseolus vulgaris
tgtcgggtcgagtgctttgctcttcttcttcttcttcttcattcttttttcactttttgcttcttctatttctcaaaacccttagcatcacgttccttataatagcatttcacaaaccctcactttcttctatccgaaacctccaatctctctttctctctctcgctcactccaatttctttcacaactcgccggaaaatctccccggcggcggctatggctgactatttctccggctccgtcgaattcggactcaacctatcgaagcgagtttactacggcagaggatcggctccactgtcggttccgtcgatgtcacggtcgccggagggattcctcccgacggcgccgatgtgctacgcggtgatatccgatccggagaaggtcgacaatccggacattcggagttaccagccctacgtgctcggcgagtgcgatcctccggcgctgataccgcttgagcttcacggcgtcgccatggaagtggagtgctccttggacacggcgtttgtaacggtcaccggaaagtggcgcgtgcattgcgtgaccggaagtagtacgtgtgattgccaggttgccatacccatgggtgaacagggttcacttctaggtctagaggttgatggttctggaagaacttatcacactgaactgatctccctgaaggatgaaaaggataaggataaagtggccaaagctaaagatggatacttcttgaaaagccatatatacaccgttaagattccacagttgaggggaggctccgtgttctcaactaagatcagatggtcccagaaaatattatttcacgatggccagttatctctgtgtgtccctttcagctttccgtcatacgtcaacccagctggaaaaagaatttctaaaaaggagaagatatttttgaaagtgaattctggttttgcaacggaagtgttattatgcaaaaccaccagtcatcccctgaaggaactactgcgccaagctggcaaattaaatttatcatatgaagcagaagtgtcagcatggtcaagtacagacttcaatttctcgtactctttttcttcaaatgacatatttggagctgttctcttgcaatctccattcctgcgtgattttgacgaaagagagatattttgtttgtatctttacgccggaaacgggcagggcagaaaggtttttaaaaaggatgtggtgtttatagtagatataagcgcaagcatgaagggaactcctctcgataacacaaagaatgccctactgtcatcgctctctcaattaaatgcacaagatacatttaacattatagctttcaatggagcgctctacttattttcgtcatcaatggaatcagctacagaggaagcaattttaaatgctacgaagtgggttgacactaattttattgctaatggtgacactaatatcatgcttcccataacacaggcaatgaagcttcttgagaaatcaactgatgcggtccctcttatttttctcgttactgatggggctgttgaggatgagagagagatatgcaattttgtcaaaagctatgtctcaaatgggcaatcagttccaacaccgcgtatatgtacctttggcataggtttatattgcaatcactacttcctgcaaatgctagcacaaattgggaggggacattatgattgtgctcatgatttagattcaattgaatttagaatgcaaaggctattcagtacagcttcatcagttatagttgctgatgtaacaatcgaaagtttagaaagtctcgattcacatgagttattcccgtctcatatacaagatatatcatctggaagtccgttgatcctatcaggcagatacactggaactttccctgaattagttaaagtcactggtactttggcagatatgactaacttcgcagtagaccttaaagtgaaaagagagaaggatatacagctcagtaacgttcttgcaaagagacatatagacatggtcactgcacaagcctggttattgaaaagtgaagaggtggaggagaaggttacaaaaatgagtattcaaaataaagtcctgtcagagtatacctgcatgaacatggttctcgtacagagcgatgaagggaagaaaccaccggaacaatttctgttaaaaaaggcatacaacaaacttagcttccagcagttggagttcgacatgaagaagttattccttggcggactgagtgttggatttggtgactctaaagcaactgctgagaatttggcaccatctataaaggaagcaaaaccacctgaaggactactgggaaaagctgcttccacctgttgtggccgattggctgacagctgttgtggcatgtgtctgctgcaggcttgcactcttgtgaatgaccagtgcaccattgtttgcactcaactttgtgcagccctggcctgttttgagttaatcaaatgctgtattgagctctgcgagtgtgattgtttgtagtcaaattatatatgctaagtcaagcatagagaaactctttaatattacaaattgttcgcaatgtatatatatgtattatataagctcttgtgctaccaataacatgtttgtaccttataaatttcttatattcttttaattcctagactatattcccagatgttcctgcatttttatttaaaaacaaaattgagggtgg

SEQ ID NO: 1634 - DNA, 2524 bp, Cajanus cajan
cgttcctttttagtgccacttcgcaaaccctcgtcttctcccatcaaaaacctctctctctctctctctctaaattctctcagcggcgatggccgactgtttttccagctccgtcgaattcggactgaacctctccaagcgagtctactacgggaaaggaatggctccgtcgccggcgacggcgatggaaaggtcagcggagggattccttccgacggcgccgatgtgctacgcggtgatatcggatccggagaaagtggagaacccggacattcgaagctaccagccgtacgtgctgggcgagtgcgatcctccggcgctgattccgcttcaggttctcggagttggcatggaagtggagtgctccttggacacggcgttcgtaacggtcaccggaaagtggcgcgtgcattgcgtcacggcaagaagtacgtgtgactgccaggttgccatacctatgggtgaacagggttcacttctaggtctagaggttgatggttccggaagatcttaccacactgaattgatctctctgaaagatgagaaggataaggataaagtggccaaagctaaagacggatactttttgaacagtcgaatatacaccattaagattccacagtttaggggaggctccgtcttctcaattaaaatcaaatggtcccagaaaattttatttcatgatggtcagttatcagtctgtgtccctttcagctttccctcttacgtcaaccctgttgggagaagaatttctaagaaagagaagatatttttgaaagtcaattctggtggtgcaacggaaatgttatgcaaaaccgccagtcatccttttaaggaactattgcgccaagccggcaaattaaatttattatatgaagcagaagtgctagaatggtcaagtacagacttcaatttctcgtacactgttacttcaaatgacatttttggaggtcttctcttgcaatctccattcctgcgtgattttgatgagagagagatattttgcttgtatctttacccgggaaacagccaggatggaaaggtttttaagaaggatgtggtgtttatagtagatataagcgtaagcatgaagggaagtccgcttgaaaacacaaagaatgcacttctgacatcactctctcaactacatgcacaagatacatttaacattatagctttcaatggggcggtatccttattttcgtcatcaatggaaacggctacacaggaagcaattttgaatgctaccaagtgggttgatactaattttattgctaatggtgacactaatatcatgcttcccttaactcaggcaatgaagctacttgagaaatcaactgattcagtccctcttatttttctcgttactgatggggctgttgacgatgagagagaaatatgcaattttgtgacaagctatgtatcaagggggcaattggttcgaacaccacgcatatgtacatttggcataggtttatattgcaaccactacttcctggaaatgctagcgcaaattgggaggggccactatgattttgctcatgatttagatgcaatcgactttagaatgcaaaggctgttcagtacagcttcatcggttacggttgctgatataacaatcgaaggtttagaaggtcttgattcatatgagttattcccaactcatatacaagatctatcatttggaagtccgttgattctatcaggcagatacagtggaacttttccccaatcagttaaagtcaccggtactttggcagatatgactaacttcgtagtagaccttaaaatgaaaagagaaaaggatattcagctcagtaatgttctttcaaagagacatatagacttggtcactgctcaagcctggttattaaaaagtgaagagctggaggagaaggtttctaaaatgagcattcaaaataaagtcccgtcagagtatacctgcatgagcatggttcttgtacagagtgatgaagggaagaaggcacctgaacaatttctgttacaaaaggcatacaagaagcttagcttccagagtttggaaatgaacaacatccagaagttattccttggagggtggagtcttggatttggagacgtgaaagcaactgctgagaacttggcaccagctataaaagaagcaaaaccacctgaaggactactggggaaggctgcttccacttgttgcagtcgattggctgataactgttgtggcatgtgtctgctgcagacttgcaattttatgaatgacaagtgcaccatcgtttgcactcaactttgtgcagccctcgcatgttttgagttaatcaaatgctgtattgagctctgcgactgtgattgtttgtagtgaaattatgtatatgcttaagttaaacatacaaaatctgtttaatattacaaatgttaacaaggtatatattatatatataagctcttgtgctgtcatgtttgcagcttatacttgtttatattccctcaattcctcgtctaaactatgaaaaatgggaaaataatcagatataaa

SEQ ID NO: 1635 - DNA, 2620 bp, Glycine max
tatcaatccataacaagattcaaactcactcttgaacctaaaaatcatagaggtaaggaaaagcaagccatttactttttcttttttctcttcttcccaaaacaaaaacagtcacttttacacaatgccaccaaaatggtgtaaaattattctggggtccaacaagaccaagtgatgcaaattctgagacccactgagaggttgcaactgtgtgctgcactgtggctagaactacatgttctgtggttcccttcatgctttgcactgtggctggctcctgttctgtcaattttcactctctgggggttcagtttgagttagctcaagataaagacatggattctcagaggtttctcatttgacaaaaattgtcttgtatttctttgagggaagaagaagtagatcaagttaaaagattgcagatatgcttatgtggcttgttttgatgtttacttagttatgagggaaaaacactattttcaagggaagagctgaacttgcggaaagagtggaacaaaatttgccgagagattttctttcctttgacttgacttgcaagtacaatacaaccaatttggttgtttgctacataggaaaacgaggggcttgtttggttttttcttccactgcatcattttcagtttttcactatttgtaatgctctcattctcataccttgttctgcctcattagctttgtgtgtgtgtgaaacccttggtagagacatggcagaaattaggctcaccagggttgagcaaggccaaaccaagattaagaatgttcctatagctgtcaccccagaagggttttggtgctgcccttcccctgtggtgtttcagaaaagcctcaaaactcaaaatcctctcaataaacacaaaccctcttcaccacccccaccaaaaaccggtgttcagaaaaagccagtggccgtgcctgtgtctgtgtcagtgagtgagagaagaactgcatcatctgccccttcaagattggtgctttctgatgaaaaacaatgttcaactgctccagaaaggcctccacctaccaccacatctgtggctgctgcagagagggcacccaggcaaaaaattgaatctttgccaaagaaggttgctattgagtttggtgagcctggaacttgtgatatgaaagtggttttgttaggaaagcaggggttttgtgtcaagttgagtgttcacagggatgttttgacccagaagagtggtttcttttctgaaaaactctccgaacaatcgggtttgtcgtgcctccaaatcgctgactgcgaggatgtggagatatatgttgaaactgttggtcttatgtactgtaaggagatgaagcaacggcttatgaagcaaagtgtttctcgcattcttcgaatacttaaggtagcagaattccttggcttcagctcgtgtatccaatcatgtttggagtacttggaggcagtcccttgggttggagaagaagaggaagaaaaggtggtctcaactgtactacaactccaagcagaaggaattggagtcaaccctgtgctgaaacgaatttcatccgacatttctaatgtcccaaaagacactctttcccacatcatcgaccttgttctcaagagcaatgaggaaagtggccgtcgagagatgaaatccattgttctaaagctcttcagggagaacaacagtcttccaagctatgcgcgatcaaccgacatatgcaatgacatgatttacagatcatgcagaagctgcttggattcattgctgtctctattcaagcaggctgcagaaccagacaaactgagtgaggaccacaatcctacagcaaagtgcattgctctcgaagctgataacttatcatggttgcttgagattttaattgacaaacaagctgctgatgagtttgcactgatgtgggcaaaccaacaggaactggctgtgctacatgcaaagctgccgaccgtgtcacgctactatgttagctgcctttcggggagactgtatgttggcattggaagaggggagttgttgccatcaaaggatgtgcgccggttgttgttacagacatggctgcagcctctgatgaatgactacaactggctgcagcatggatgcaggtcatttgataggaaacttgtggaggaaggaattgggaggactattctcaccttgcctcttgaggatcaacaaagcattttgctttcatggttggggagtttcttgaaaactggtgatagctgtcccaatcttcaaagggcatttgaggtgtggtggaggagaaccttcattaggccatatgtggagaaccaaggtaatgttgctgtgtcagatagtagttcaatgttgccaaagcagcgtgagtgaataaagggttcatgaatatgtttcattggtagtggagttttagttttatattaacgagtttgaggaaatgtaaagatatgtgttgattgcagaatggggattaatctccagcagctaacaagtactgagaagtgtcatgtgatttgcatggcttttactctggattaattctttgaggaagacctcattgaattaataaacttcagtaattggtttttgtattatgtcttcaaagaaagaaatggattggtgtttagctttta

SEQ ID NO: 1636 - DNA, 2966 bp, Cajanus cajan
gggacacaaagaatctcagaaaattatggaaaaaataaacggaacaaaacgggtggcatgcctgctgtctgtgatgagtgctgagttgttgtgagtagagaacaataggaaaaacaagagaagcaaatgaaaaagcaatactttttctttttctcttcttccaaagaccatcacttttaaacacaacaaatggtggtgtaaataaaattctgggggccaagtgatgcaaattctgagacccacgtaggtacgaagacaaatcatcaaaagcatggaagtggcaaagtgaagaaaacacagcccatgagccatcatcatccctttttgcttttctatggtgtctcgtggtgtttctaattccctctactttacaaattaaagaggttagaactgtgtgctacactgcactgcactactaattgtcctctctggctacaatacaactctatgttacctggttcccttcatgctttgcactgtggatcctgttctgtcacttttcacacactgtgggttcagttgagttggaataagataaaagacatgaattctctgaggtttctcaagtgacaccatgtcttggactcttggtaatggtaatgtaattctttaaggggagaagtagatcaagttaagagattgcagatgcttatttggtttgtttccttagttacaaggcgaaaaacactgttttcaagggaagagccgaacttgcggaaagagtggagcaaaatttgacgagcgattttctcctccttgacttgacttgcaagtacaatacaaccaatttggttgtttgttacataggaaaacaacgaggggcttgtttggtttttgtcttccaccgcatcattttcacaactcgtaacttgtgatgctctcatatcttgttctcccacattagctttgtgtgtttgtgaatcttggctagagatggcagaaattaggctcaccagggtggagcaaggccaaaccaagatcaaaaatgttccaatagctgtgaccccagaagggttttggtgctgcccttctcctgttgtgtttcagaaaagcctcaaggcccaaaaccctctcaacaagcccaaaccctcttcacccccgccaaaaaccagtgttcagaagaagccagtgtctgtgccagtgtgtgagagaagagcttctgcagcacctgccccttcaagattggtgctttctgatgatcagcaatgtgcaactgctccagagaggcctccacctaccacatctgtggctgcagagaggacacctaggcccaaaattgaatctttgccaaagaaggttgctattgagtttggtgaacccggaacttgtgatatgaaggtggttttgttgggaaagcagggtttttgtgtcaagttgagtgtgcacagggatgttctgacagagaagagttgcttcttttctgaaaaactctctgaacaatccggtttgtcctgtctccaaatcggtgactgtgaggatgttgagatatatgttgaaactgttggtcttatgtactgtaaggagatgaagcagcggcttatgaagcaaagtgtttctcgcattcttcgaatactcaaggtagctgaattcctcggcttcagctcatgtatccagtcatgtttggagtacttggaagcagtcccttgggttggagaagaagaggaagaaaaggtggtctcaactgtactgcaactccaagctgaaggaattggggtcaatcctgtgctgaaaagagtgtcatctgacatttctaatgtcccaaaagacactcaccctctttcccacatcattgaacttgttctcaaaagcaatgaggaaagaggccgccgagagatgaaatccattgtcctaaagctcctcagggagaacaacagtcttccaagctatgcccgttcaactgacatatgcaatgacatgatttacagatcatgcagaagctgcttggattcattactgtctctgttcaagcaggctgcagaaccggacaaaccgagtgaggagcgtgatccattaacaaagtgcatagctcttgaagctgataacttatcatggttgcttgagatcttaattgacaaacaagctgctgatgagtttgcactgatgtgggcaaaccagcaggaactggcagtgttacatgctaagctgccgaccgtgttgcgctaccatgttagctgcctttctgggaggctttatgttggcattggaaggggggaattgttgccgtcgaaggacacacggcagttgttgttgcagacatggctgcagcctctgatgaatgactacaactggttgcagcatggatgcaggtcatttgatcggaaactcgtggaggaaggcattgggaggactattctcaccttgcctcttgaggatcaacagagcattttgctttcatggttggggagtttcttgaagactggtgatagttgtcccaatcttcagagggcttttgaggtgtggtggaggagaactttcattagaccttatgtggagaaccaaggtaatgttgctgtgtctgctgatagttcaatgttgccaaagcaacaagaatgaagaaagtgtcaaatggggttcttgaatgtctttcattggtaatggagtttttggtttatattaaggagtttgaggaattgtaaagatatgtgttgattgcagaatgtggattaacctccagcagctaactagtactgagacgtgtcatgtgtcccttgcatgagttgactctctattaattctttgaggaagacctcaatgaattgataaatttcagtaattggattttgtataatctcttcaaagagaggaatggaatggagtttttagttttttttttcttcctattttgactgtgtaatactataattaataattacaatagggtatcaaacattataaatccctagggaaaaaaaaaagaaagaaaaacaaagcaaaccaaatgcatgctctttatatatctttcattt

SEQ ID NO: 1637 - DNA, 3011 bp, Phaseolus vulgaris
gacggtccctttaagcaattgggacacaaagaatctcagaaaattatggaaaaaaataacaaaggaaggcatgcttgctgtcagtgattatgagtgagttgtgtgcattacacaacagtatgaaaaacaagagaagcaaatgaaaagccaattactttttctttttctcttcttcccaaaaacagtcacttttgcacacaacaaataaatggtgtaacattctggggtccaaaaaaacaagtaatgcaaatttcagagacccacagtggtacaaagtcaatcatccaaagcatggaactcaaacacaccccatgagccatcatcatcatccactcgttcattctctttttgcttttcctttttttcctgtcttgtggtgttttttccaattctaattccttctactttacaaattgaagaagggattgcaggttgcaactgtgtgctacactgcactgcgctaattatcttctcttgctataactacaatgtttctgattcccttcatgctttgcactgtggcttctgttctgtcacttttctctctctgggttcagttgagttagcaatataatgacatgggttttcagtggtttctcatgtgacaccattacttggtaagctaccttttggcggtgctgcggttgctggtgacaagagaaagaagccgtttttctgtttttggccttttcccctgtttttctctttagcatgctaactcttcggttatacttttaaaataaaaaatactttaacaactctctctctctcttcgaaaattaaattaatctgggattcaaattttttgtgaaaaaaaaaacaaataagaaactgcattaaggggagaagcagatcaagttaagattttgcagatggttagttggttcgtttccttagttatgcgggaggagcactgttttcaagggaagagctgaacttacggaaagggtgtaacaaaacttgccgagagattttctttcccttgacttgactttgaagtacaatacaccaaatttggttgtttgttaatcaggaaaacgagggtcgtgtttgcttttttcttcctttgcatcattttcagttttgactacttgtgatgctcccataccttattcttccacattagctttgtgtgtgtgttgggagtcattggtagacatggcaggaattaggcttaccaggatggagcaaggccaaaccaagataaaaaatgttccaatagctgtgaccccagaagggttttggtgctgcccttctcctgtggtgtttcagaaaagcctcaaggctcagaatcctctcaataagcccaaaccctcttcacccccaccaaaaagcagtgttaagaaaaagcccgtgtctgtgccagtgtatgagaggagaactgttacagctgcagatgccccttcaagattggtgctttctgatgatcagcaatgtgcaactgctccagaaagacctcctccacctacttcatctatggctgctgcagaaaggggacccaggccaaagattgaatctttgccaaagaaggttgctattgagtttggtgaacctggaacttgtgatatgaaagtgattttgcttgggaagcagggattttgtgttaagttaagtgtgcacaggaatgttctgactgagaagagtagcttcttctctgaaaaactatctgaacaatcgggtctgtcttgtctccaaatcggtgaatgtgaggatgttgagatatatgttgaaactgttggtcttatgtactgcaaggagatgaagcagcggcttatgaagcaaagtgtttctcgcattcttcgaatacttaaggtagcagaattccttggcttcatctcatgcatccaatcatgtttggagttcttggaagcagtcccttgggttggagaagaagacgaagaaaaggtggtgtcaactgtgctacaactccaagcagaaggaattggagtcaaccctgtgctgaaacgagtttcagctgacatttctaatgtcccaaaagacactctttcccacatcatcgaccttgttctgaaaagcaacgaggaaagaagccgccgagagatgaaatccattgttctaaagctcctcagggagaacaacagtcttccaagctatgcgcgtacaaccgacatatgcaatgacaccatttacagatcatgcagaacctgcttggactcattactagaactgttcaagcaggctgcagaacccagtgaggaccgagatcctctagcaaagagcatagctcttgaagctgataacttaacgtggttgcttgagattttagttgacaaacaagctgctgatgagtttgcactgatgtgggcaaaccaacaagaactggctgtgttacatgcaaagctgccaacggtgtcacgctactgtgttagctgcctttctgggagactctatgttggcattgggagaggggagttgcttccatcgaaggacactcgcaggttgttgctacaaacatggctgcaacctctgatgaatgactacaactggctgcagcatggatgcaggtcatttgataggaaacttgtggaagaaggaattgggaggactattctcaccttgcctctggaggatcaacagagcattttgctttcatggtgtgggagtttcttgaaaactggtgatagctgtcccaatcttcaaagggcatttgaggtgtggtggaggagaactttcattaggccttatgtggagaacctaggtaaggttgctgtgtcagatagttcaaaatttactctctttgctaaataaacacgagtgaaaaaattgtcaaatggggttcatgaatgtctttctttgatagtggagtttcagtttatattaacaagtttggggaattgtataaaggtatgtgttgattgcagaatgtggattaacctccagcatctaacagtctgagacttgtcatgtgtcttgcatgagttgcctctggattggtttttgtattatctcttcaaagaaaggaatggaatggagttctagtttttttcctt

SEQ ID NO: 1638 - DNA, 2715 bp, Cicer arietinum
tcagagacccacaaaaaaaggtacaacaatcatcaaaagcatggaagaactgttaaagtagaaaacacagttcatgacccatcatcatccattctctttttcctttttcgggtcttgtggtgttttttttttcttctttctttctttctccactttacaaattaaacaaaacaaacactctttactaaaacttcactcattcattcttctctctgctttgttccctccatgctttacactacacctcttattcaatcattttcaacactatgaaggttcacaagaattagagagttttctcaaagcaccatttattgtgattcaatttggggaaaagcagatcagcttcagagattgcaagttttgatttttatctttattttaattttatatgtagttatcattattgggaagggaaaaaaaagcagtgtattcaattcaaagagaagaagtgaacttccggaaagagtggaacaaaatttggcgagatattctcttacccttttgacttgactatttagttagttaaattaatgtttgtttgtttgttacataggaacttgttgttgttttgttattttcagttttcagtaaacatcatcattttctcattaatgcaatcttatcttgttccaaattagttctgtgtttgttaatctatcattatgggggatattaggcttaacaaccgtgtcgatcaaggccaaactaagattaagaatgttcctatagctgttacacctgaaggtttttggtgttgtccttcacctgttgtgtttcaaaaaagtctcatcaagaatcaaaatcctttgaataaaactaaaccttcttcaccaccaccgccgccgccgaagactagtgttcagaaaaaggcggtgcctgtggctgtgacagtgactgagagaagaggttctacacatgcttcatctagattagtgatttctgatgatcaacaatgtagtattgattcagaaagggtatcagcaggtacatctttggctggtgagagagtttcttctagaccgaaaattgaaactatgccgaggaaggtagctattgagtttggtgagcctggaacttgtgatatgaaggttgttttgttagggaagcagggtttttctgttaagttgagtgtgcatagggatgttttgattgagaagagtagtttcttttctgaaaagctctcagaacaatcggatttgtcttgtttacaagtcggggattgcgaggatgttgaaatttatgttgaaactgttggtttgatgtattgcaaggaaatgaaacagaggctcatgaaacaaaatgtttctcgcattcttcggattcttaaggttgcagaattccttggcttcagctcatgtatccaatcatgcttggagtacttggaggctgttccttgggttggagatgaagaagaagaaaaagtggtctcaactgtactacaactccaaggcgaaggaatcggggtcaaccctgtgttgaaacgagtttcttccgacatttccaatgtcccaaaagacacactttccctcattattgaacttgttctcaaaagcaatgaggaaaaaggtcgccgagagatgaaatccatagttctcaagctcctcagggagaataacagtcttccaagttacgcgcgatccaacgatatatgtaatgacatgatatatagatcatgcagaagctgtgtggactcattgttatctcttttcaagcaggttgcagaaccatcctttgcagagaaaccaagcaacgaaagagattctgtagtaaagcatatagctcttgaagccgataacatttcctggttgctcgatattttaattgacaaacaagcagctgatgaatttgcactaatatgggcaaaccagcatgaattagcttccttacacgcaaagctgcctatcgtatctcgctatcacgttagctgcatttcaggaagactatacgtcgggattggtagaggagagttgttgccgtcaaaggaaacacggcagttgttgttacagacgtggctgcagccactaatgaacgactacaattggttacagcatggatgcaggtcgttcgataggaaacttgtggaggaaggaatcgggaggacaattctcaccttgcctttggaagatcaacaaagtattttgctttcttgggttggaagtttcttgaaaactggtgatagttgtcctaatcttcaaagagcttttgaggtttggtggcgcagaactttcattaggccgtacatcgaaaatcaaggtaatgttgtgtcagattgttcaatggcgtcgaagaaggacgaataaagaagtatatgatgaaacaatatgagatttatgaatatagtttcagtggtattatggttggtagaattgcattttatataacaagttttaagggattgtagagactaagttgacagaagaatgtgtgttaacctcctccagcagctgacaaaaagtttagtattgaaaagtgttatttgtgattgtatgagttgattgtggattctatgtggaaacaaaatagctgaattgatgaatttgtgtttttggttttttgtataatctcttcaaaggagtggagtggaattcttagttttttaactaatctgattgtaaagatagtagcatgaccttaaatcctagtattactttatgagtagaagaagtgacatgagataatgaagtttgtgttgacttgaaaatttcctactaa

SEQ ID NO: 1639 - DNA, 2495 bp, Medicago truncatula
aatacaacaaataatgtactagtgttatataattctgtggtccaattcaatacaacaaaaaatttctgagagacccacaaagtgaaataatcatcaaaagcatggaatggaactgttaaagtagaaaacacagttcatgagctatcatcatccattctccttttgctttttcggttcctgtgctgtttcttttctctactttacaaatttaacaaaacaatccactcattgttttcaacactgaaagggtttcagaacacaccatttttagtgattcaatttgaggaaaaagcagattcagcttcagagattaccttacaagtgttgatttttatgaaggaaaagcagttaattcaaaggacgaattcaacttccggaaacactggaacaaaatttggctaaatattctcttaccctttgacttgactatgtagttagttagttagtacaattaatgtttgttacatagaaacttgtaacttgtttggttatgtctggtttttcaacagccattttctcactgatgcaatcttagtatcttgttccaaattagttttgtgtctgtaaaaatcattgctttacataaacatgggtgatgttaggcttaatagggtagatcaaggacaagccaagattaggaatgttccaatagctgttacccctgaagggttttggtgttgtccttcacctgttgtgtttcagaaaagtcataagcctcaaaatcctttgaataaaaccaaaccttcttcatcaccaccacaaccacaacctaaaactagtgttcagaaaaagccggtcgcggtgcaagtgactgagagaagaggttctgcacctgcaccatctagattggtgatttctgatgatcaacaatgtagtattggtgtagaaaggtctttagccggaacatctttagctgctgagagagtatcttctagaccgaaaattgaaaccatgccgcgaaaggtggctattgagtttggtgaacctggaacatgtgatatgaaggtggttttattagggaagcaagggttttctgttaagttgagtgtgcatagggatgttctgatagagaagagtagtttcttttctgaaaagatttcggagcaatcggatatgtcttgtcttcaaatcggcgattgtgaggatgttgaaatatatgttgaaactgttggtttgatgtactgcaaggaaatgaaacagaggcttatgaaacagaatgtttctcgcattcttcgaattcttaaggttgcagaattccttggcttcagctcgtgtgtccaatcatgcttggagtatttggaggctgtcccatgggttggagatgaagaagaagaaaaagtggtctcaactgtacttcaactccaaggggaaggaattggagtcaaccctgtgttgaaacgaatttcttctgacgtttccaatgtcccgaaagacacactttcccacattattgaacttgttctcaaaagcaacgaggaaaaaggtcgccgggagatgaaatccatagtcctaaagctccttagagagaacaacagtcttccaagttacgcgcgttccaccgacagctgtaatgacatgatatatagatcatgcagaagctgcttagattcgttagtgtctctcttcaagcaggctgcagaaccaacttttgcagataaaccaagcgacggaagagattccgtagtaaagcatatagctcttgaagctgataacctttcgtggttgcttgatatcttagttgacaaacaagctgctgatgagtttgcgctattatgggcaaaccagcaggagctagctgtcttacatgcgaagttgccaattgtatcccgttatcacgtcagctgcatttccggaaaactatatgtcggcattggtagaggggagttgttgccattgaaagacacgcggcaattgttattgcaaacatggctgcagcctctaatgagtgactacaattggctacaacacggatgcaggtcgtttgataggaaacttgtcgaggaaggaattgggaggacgattctcaccttgcctttggaggatcaacaaagtattttgctttcttgggttggaagtttcttgaaaactggagatagctgtcctaatcttcaaagagcttttgaggtctggtggcgcagaacattcattaggccatatgtcgaaaatcaaggtaatgccgtgtcagatagttcgacgatgtcaaagaaggacgaataaataaagaagtagtggaattgcattttatataactgagtttaacggattgtagagattaagtagacagcagaacgtgtgttaaccttttccagcagctgacaaaaagtttagcattgaaatgtgttatttgtaattgcatgagttgattgtggattctgtgtggaaacatcactcaattgatgaattttcttgtttttgtttttttgtataatctcttcaaaggagtggaatggattcttagtttttaactaatcctaatgtaaaaatcgtagcatgtc

SEQ ID NO: 1640 - DNA, 2331 bp, Lupinus angustifolius
agtttgggaccaaatgatgcaccaaattctgagacccaccacacaaacaatcatcaaaaagcatattgaactgttgttccttttggttttgggtggaagaggagatcacctacaaagatttaagctgttcattcttcttatttccaaagtttaagaaatagtgtattcaaaagaagaggtgaagttctacagagaaaggagcaaactttgctgagatattttgtcttattgacttgccagtacatcaaaatctttgtttttacattggaaacaaggacttgtttggttgtttggttctgtgttgattacaactacaatcatttttattgtgatgccatcataatcgtgttgttccatattagcagtgtgtgtttgtgaaaacttgttaagtatggcagaaattaaggttacaagggtggggcaaggccaaaccaagattaagaatgttccaatagctgtcacccctgaaggtttttggtgttgcccttcacctgttgtgtttcagaaaagcctcaaggctcaaaatcctatgaataaacctaaagcaccatgttcgcccccaacgaaaactagtgtccagaaaaagccagcgcctgtgccagttccggtgagtgagagaagagcttctgcagctgcacctaccctatcaaaattgttgctttctgatgatcaacaatgtagttctggtcctgaaagaactccagctagaacaactatggcagcagatagaggccctagacccaaaattgaaactttgccaaggaaggtagctattgagtttggtgaacctggaacttgtgatatgaaggtggttttgttaggaaagcagggattttgtgtgaagttaagtgtgaatagggatgttctgactgagaagagtagcttctttgctgataaactttctgaacaagcgggtttgtcatgtcttcaaattgatgattgtgaggatgttgaaatatatgttgaaactgttggtctcatgtactgcaaggatatgaagcagcggcttatgaagcaaagtgtttctcgcattcttagaatactaaaggttgcagaattccttggcttcagctcatgtatccaaccatgtttggattacttggaagcagtcccttgggttggagacgaggaagaagaaaaggtggtttcaaccgtactacgacttcaagcaggagttaaggtcaaccctgtcctgaaacgagtctcttctgatatttctaatgtcccgaaagatacccttttccaaattatcaaacttgttctcaatagcaacgaggaaagaggtcgccgagagatgaaatccatagttctgaagctccttagggagaataacaacagtcttccaagccaagctgtttcatctgtaatctgtaatgacatgatttatggatcatgcagaagctgcttggattcattattgtctcttttcaagcaggctgcagaaccagccttctcagacaaaccaagtgatgacagagatcctatagtaaagcatatagcccttgaagccgataacttgtcatggttgctcgatattttaattgacaaactagcagctgatgaatttgcattgatgtgggcaaaccagcaggaattggcatcgttacatgtaaagctgccaattgtctcacgttatcatgttagctgcatttccggaagactctttgttggcatcggtagagggcaactgttgccatcgaaggacatgcggcaattgttgttacagacatggctacaacccctaatgaatgactataactggttacagcatggatgcaggtcatttgatgggaaacttgtggaggaaggaatcggtaggacaattctcaccttgcctcttgaggatcaacaaagcattttgctctcatggttgggaagtttcttgaaaaccggctatagttgtccgaatcttcagagagctttcgaggtctggtggaggagaactttcattagaccacatgtggaaagtcaaggtaatgctatgtcagatagttcaatattgttgtcaaagcaacatgaatgaagaagtatcaaatgatgagatttaccaatatgtttcaatggtattgaaatgtcaatttatgttaaggaatctatggagttgtaaagatgtgttgattgcagagtttgatttaaactctattaggtaagtgataagacatgtcacatgttcattggatgaatcaaatgtagattctgaggaagattaatagcctcaatgaattgataattttcagtatttgatttttctataagctcttcaggggaatgaaatgaaatttgtttgaatgtagtgtagcaataaaggattattaactgctttaaaatcta

SEQ ID NO: 1641 - DNA, 2419 bp, Trifolium pratense
agctatcataatccattccctttttactttttcgggtctcgtggtgtttttcttttcactacttttcaaattaaacaaacaacaattcactcattgttttcatgcttttcttcaatcattttcatcactgaaagggtttcagaacaattattcagtttgttcaatggctcaaaccacaccattcattgtgattaagcagattcagcttcagagattatacaagtgttgatttttatgaaggaaaatcactttattcaagggaagaattcttctttcggaaataaaggaacaacatttggctaaatattctctcttacccttttgacttgactttatagttagttcaattaatgtttgttacataggaaattgaaacttgtttggttatttctggtttttcaacagcatcattttctcactgatgcaatcttagtatcttgttctaagttggttaaaaatcgtttcttttcgattttcataaacatgggagatattaggcttaatagggtagatcaaggacaaaccaagattaagaatgttccaatagctgttactcctgaagggttttggtgttgtccttcacctgttgtgtttcagaaaagtcataagcctcaaaatcctttgaataaaactaaaccatcttcgtcaccaccacagccgcaaccgaaaaatagtgttcagaaaaagccggttccagtgcaagtgactgagagaagaggttctgtatctgcatctgcatctgcatcgtctagactggttgtttctgatgatcaacaatgtagtattggttcggaaagggcttcagctggaacatctttggctggtgagagagtatcttctagacctaaaatcgaaaccatgccgagaaaggtagctattgagttcggtgaaccgggaacttgtgatatgaaggtggttttattagggaagcagggtttttctgttaaattgagtgtgcatcgggatgttctgatagagaagagtagtttcttttcagaaaagttttcggaacaatcagatttgtcttctctacaaatcggcgattgtgaggatgttgagatatatgttgaagctgttggtttgatgtattgcaaggagatgaaacagcggctcatgaaacagaatgtttctcgcattcttcggattcttaaggttgcagaattccttggcttcagctcgtgtgtccaatcatgcttagagtatttggaggctgtcccatgggttggagatgaagaagaagaaaaagtggtctcaactgtactacaactccaaggggaaggaatcggaatcaaccctgtattgaaacgagtttcttctgatgtttccaatgtcccgaaagacacactttcccacattatcgaacttgttctaaaaagcaatgaggaaaaaggtcgccgagagatgaaatccatagttctaaagctcctcagagaaaacaacagtcttccgagttacgcccgttccactgacacctgtaatgacatgatatatagatcatgcagaagctgcttagattcattgttatctctcttcaagcaggccgcagaaccaacctttgcagagaaaccaagtaatgaaagagatctcgtagtaaagcatatagctctagaagccgataacctttcatggttgctcgatattttggttgacaaacaaggagctgatgagtttgcgctattatgggcaaaccagcaggaattagccgtcttacatgcaaatctgccgattgtgtctcgttatcacgttagctgcatttccggaagactatttgtctgcatcggtagaggggagttgttaccatcaaaggaaacacgacaattgttgttacagacatggttgcagccgctaatgaacgactacaattggttacagcatggatgcaggtcatttgataggaaacttgtagaggaaggaatcggaaggacaattctcaccttacctttggaagatcaacaaagtattttgctttcttgggttggaagtttcttgaaaacaggcgatagctgtcctaatcttcaaagagcttttgaggtgtggtggcgtagaactttcattaggccgtatgtcgaaaatcaaggtaatgccgtgtcagatagttcaacggtgtcaaagaaagacgaataaagaagtatatgatcgaacgaaactcatgaatatacttttgatggtattatggtagtggaattgcattttatataactgagtttaagggattgtagagattaagttgacagcagaaaatgtgttaacctacagcagctgacaaaaaagtttagtattgaaacgtcttatttgtgattttatgagttgattgtggtttctatgtggaaacatcactactgaattgatgaatttctttttttggttttttgtattactctttcaaaggagtggaatggaattcttagtgtttaactaa

SEQ ID NO: 1642 - DNA, 2288 bp, Trifolium pratense
ttcaaattaaacaaacatttcactcattgtcttcatgcttttcttcaatcattctcatcactgtgagggtttcagaagaattattcagtttgttcaaagcctcaaacctcaccattcattgtgattaagcagattcagcttcagagattatactacaggtgttgatttttatgaaggaaaaaagcactgtattcaagggaagaattcttcttccggaaataaaggaacaaaatttggctacatattctcatacccttttgacttgactatatagttagttagttcaattaatgtttgttacatagaaacttgaaacttgtttggttatttctggtttttcaacagcatcattttctcagtgatgcaatcttagtgttatcttgttccaaattagttaaaaagtgattctttttcgattttcataaacatgggagatattaggcttaatagggtagatcaaggacaaaccaagattaagaatgttccaatagctgttactcctgaagggttttggtgttgtccttcacctgttgtgtttcagaaaagtcataagcctcaaaatccgttgaataaaactaaaccgtcttcgtcaccaccacaaccacaaccgaaaaatagtgttcagaaaaagccggttgcagtgcaagtgactgagagaagaggttctgcatctgtatctgcatcgtctagattggttgtttccgatgatcaacaatgtagtattggctcggaaagggcttcggctggaacgtctttggctggtgagagagtatctagacctaaaatcgaaaccatgccgagaaaggtagctattgagtttggtgaacctggaacttgtgatatgaaggtggttttattagggaagcagggtttttctgttaagttgagtgtgcatcgtgatgttctgattgagaagagtactttcttttctgaaaagatttcgaaacaatcagatttgtcttgtctacaaatcggcgattgtgaggatgttgagatatatgttgaagctgttggtttgatgtattgtaaggagacgaaacagcggctcatgaaacagaatgtttctcgaattcttcggattcttaaggttgcagaattcctcggcttcagctcatgtatccaatcatgcttagagtacttggaggctgtcccatggattggagatgaagaagaagagaaagtggtctcgactgtactacaactccaaggggaaggaatcggggtcaaccctgtattgaaacgagtttcttccgaggtttccaatgtcgcgaaagacacactttcccacatcatagaacttgttctcaaaagtaatgaggaaaaaggccgccgagagatgaaatccatagttctaaagctcctcagagagaacaacagtcttccgagttacgcccgttccactgacacctgtaatgacatgatgtatagatcatgtagaagctgcttagattcattactatctctcttcaagcaggccgcagaaccaacctttgcagagaaaccaagcaatgaaagagatctcgtagtaaagcatatcgctctagaagctgataacctttcatggttgcttgatattttggttgacaaacaaggagctgatgagtttgcgctcttatgggcaaaccatgaggaattagctgtcttacatgcaaagcttccgattgtgtctcgttatcacgttagctgcatttccggaagactatttgtctgcatcggtagaggggagttgttaccatcaaaggaaacacgacagttgttgttacagacgtggctgcagccgctaatgaacgactacaattggttacagcatggatgcaggtcatttgataggaaacttgtggaggaaggaatcggaaggacgattctcaccttgcctttagaagatcaacaaagtattttgctttcttgggttggaagtttcttgaaaaccggcgatagctgtcctaatcttcaaagagctttcgaggtgtggtggcgtagaactttcattaggccgtatgtcgaaaatcaaggtaatgccatgtcagatagttcgacactatcaaagaaagacgaataaagaagtatatgatcgaacttttgatggtattatggtagtggaattgcattttatataactgagtttaagggattgtagagattaagttaacagcaaaacatgtgttaacctacagcagctgacaaaatgttaagtattgaaacgtgttatttgtgattttatgagttgattgtggagattctatgtggaaacaacactactgaattgatgaatttctttttttggtttt

SEQ ID NO: 1643 - DNA, 2007 bp, Trifolium pratense
cagtgatgcaatcttagtgttatcttgttccaaattagttaaaaataatttcttttcaattttcataaacatgggagatattagacttaatagggtagatcaaggacaaaccaagattaagaatgttccaatagctgttactcctgaagggttttggtgttgtccttcacctgttgtgtttcagaaaagtcataagcctcaaaatcctttgaataaaactaaaccgtcttcgtcaccaccacaaccacaaccgaaaaatagtgttcagaaaaagccggttgcagtgcaagtgactgagagaagaggttctgcatctgtttctgcacctgcatcgtctagattggttgtttccgatgatcaacaatgtagtattggttcggaaagggcttcagctggaacatctttggctggtgagagagtatctagacctaaaattgaaaccatgccgagaaaggtagctattgagtttggtgaacctggaacttgtgatatgaaggtggttttattagggaaacagggtttttctgttaagttgagtgtgcatcgcgatgttctgatagagaagagtagtttcttttctgaaaagatttcggaacaatcagatttgtcatgtctacaaatcggcgattgtgaggatgttgagatatatgttgaagctgttggtttgatgtattgtaaggagacgaaacagcggctcatgaaacagaatgtttctcgaattcttcggattcttaaggttgcagaattcctcggcttcagctcatgtatccaatcatgcttagagtacttggaggctgtcccatggattggagatgaagaagaagaaaaagtggtttcaactgtactacaactccaaggggaaggaattggggtcaaccctgtattgaaacgagtttcttccgaggtttccaatgtcgcgaaagacacactttcccacatcatagaacttgttctcaaaagtaatgaggaaaaaggccgccgagagatgaaatccatagttctaaagctcctcagagagaacaacagtcttccgagttacgcacgttccactgacacctgtaatgacatgatgtatagatcatgtagaagctgcttagattcattactatctctcttcaagcaggccgcagaaccaacctttgcagagaaaccaagcaatgaaagagatctcgtagtaaagcatatcgctctagaagctgataacctttcatggttgcttgatattttggttgacaaacaaggagctgatgagtttgcgctattatgggcaaaccaagaggaattagctgtcttacatgcaaagctgccgattgtgtctcgttatcacgttagctgcatttccggaagactatttgtctgcatcggtagaggggagttgttaccatcaaaggaaacacgacaattgttgttacagacgtggctgcagccgctaatgaacgactacaattggttacagcatggatgcaggtcatttgataggaaacttgtggaggaaggaatcggaaggacgattctcaccttgcctttagaagatcaacaaagtattttgctttcttgggttggaagtttcttgaaaaccggcgatagctgtcctaatcttcaaagagctttcgaggtgtggtggcgtagaactttcattaggccgtatgtcgaaaatcaaggtaatgccatgtcagatagttcgacggtgtcaaagaaagacgaataaagaagtatatgatcgaacgaaattcatgaatatacgtttgatggtattatggtagtggaattgcattttatataactgagtttaagggattgtagagattaagttaacagcaaaacatgtgttaacctacagcagctgacaaaaagttaagtattgaaacgtgttatttgtgattttatgagttgattgtggagattctatgtggaaacaacactactgaattgatgaatttctttttttggttttttgtattactctttcaaaggagtggaatggaattcttagtgtttaaccaaaaa

SEQ ID NO: 1644 - DNA, 2452 bp, Trifolium pratense
aactgttaaagtagaaaacacagttcatgagctatcataatccattccctttttactttttcgggtctcgtggtgtttttcttttcactacttttcaaattaaacaaacaacaattcactcattgttttcatgcttttcttcaatcattttcatcactgaaagggtttcagaacaattattcagtttgttcaatggctcaaaccacaacattcattgtgattaagcagattcagcttcagagattatacaagtgttgatttttatgaaggaaaatcactttattcaagggaagaattcttctttcggaaataaaggaacaacatttggctaaatattctctcttacccttttgacttgactttatagttagttcaattaatgtttgttacataggaaattgaaacttgtttggttatttctggtttttcaacagcatcattttctcactgatgcaatcttagtatcttgttctaagttggttaaaaatcgtttcttttcgattttcataaacatgggagatattaggcttaatagggtagatcaaggacaaaccaagattaagaatgttccaatagctgttactcctgaagggttttggtgttgtccttcacctgttgtgtttcagaaaagtcataagcctcaaaatcctttgaataaaactaaaccatcttcgtcaccaccacagccgcaaccgaaaaatagtgttcagaaaaagccggttccagtgcaagtgactgagagaagaggttccgcatctgtatctgcatctgcatcgtctagattggttgtttctgatgatcaacaatgtagtattggttcggaaagggcttcagctgggacatctttggctggtgagagagtatcttccagacctaaaatcgaaaccatgccgagaaaggtagctattgagttcggtgaaccgggaacttgtgatatgaaggtggttttattagggaagcagggtttttctgttaaattgagtgtgcatcgggatgttctgatagagaagagtagtttcttttcagaaaagttttcggaacaatcagatttgtcttctctacaaatcggcgattgtgaggatgttgagatatatgttgaagctgttggtttgatgtattgcaaggagatgaaactgcggctcatgaaacagaatgtttctcgcattcttcggattcttaaggttgcagaattccttggcttcagctcgtgtgtccaatcatgcttagagtatttggaggctgtcccatgggttggagatgaagaagaagaaaaagtggtctcaactgtactacaactccaaggggaaggaatcggaatcaaccctgtattgaaacgagtttcttctgatgtttccaatgtcccgaaagacacactttcccacattatcgaacttgttctaaaaagcaatgaggaaaaaggtcgccgagagatgaaatccatagttctaaagctcctcagagaaaacaacagtcttccgagttacgcccgttccactgacacctgtaatgacatgatatatagatcatgcagaagctgcttagattcattgttatctctcttcaagcaggccgcagaaccaacctttgcagagaaaccaagtaatgaaagagatctcgtagtaaagcatatagctctagaagccgataacctttcatggttgctcgatattttggttgacaaacaaggagctgatgagtttgcgctattatgggcaaaccagcaggaattagccgtcttacatgcaaatctgccgattgtgtctcgttatcacgttagctgcatttccggaagactatttgtctgcatcggtagaggggagttgttaccatcaaaggaaacacgacaattgttgttacagacatggttgcagccgctaatgaacgactacaattggttacagcatggatgcaggtcatttgataggaaacttgtagaggaaggaatcggaaggacaattctagccttgcctttggaagatcaacaaagtattttgctttcttgggttggaagtttcttgaaaaccggcgatagctgtcctaatcttcaaagagctttcgaggtgtggtggcgtagaactttcattaggccgtatgtcgaaaatcaaggtaatgccgtgtcagatagttcaacggtgtcaaagaaagacgaataaagaagtatatgatcgaacgaaactcatgaatatacttttgatggtattatggtagtggaattgcattttatataactgagtttaagggattgtagagattaagttaacagcaaaacatgtgttaacctacagcagctgacaaaatgttaagtattgaaacgtgttatttgtgattttatgagttgattgtggaaattctatgtgggaacatcactactgaattgatgaatttctttttttggttttttgtattactctttcaaaggagtggaatggaattcttagtgtttaaccaaaaa

SEQ ID NO: 1645 - DNA, 2705 bp, Cajanus cajan
gcagaacttggtattggtactaacacttgatggttcccacttcctcagatcatccacactaagcacattatataaaaaaagggaatcaagagaggcacccacactgagagagaagagaacctctaaaaacaaaagtgaaaacattctctcccatagctcttccttcatttcctgtccctttttattttgttggtttgttccttctgttgcacgttctcctttgttctctgcttccgcattttgttcatgcggtgttgcagaagcagaatagtatttgacacaagtgttgtgctctcccatctcaggagaaccactcattggtagacatagcttgttaaaagcacaaaaagaaaagtgttttgagatctggctggcatgttatcctttactcactagctttcttcgagtaagagtgtctgacattccagctctgctagcttcctttgttttgcgtggcacagaagcaaaacaacaatcaccaaaagaaaaattattccacccaagtcactctttttaacccttttcgatccatctctcacaacttgagcctgcttcccattcctcactctcttttgtttttctgacacacaacttcaaaacgttccaaatggatcgcctttcttccactaccattctccccgaagcgtttgaaggggccaaagatgacctcaccatgcagcttgcattggtttggaaccaaatcaaagcgccactcattgtcccgttgctgagactagcagtgtttctgtgcttgatcatgtcggtcatgatgttcattgagagggtttacatgggcattgtcatcactctggtgaagttgtttggcaaaaagccagagaaacgttacaaatgggagccaatgaaggatgacattgagctgggaaactcttcttatccaatggtcctcgttcaagtccctatgtacaatgaaagagaggtttatcagctctcaattggagctgcttgtggactttcttggccttcagataggatcatcatacaagtccttgatgactccactgacccaacaatcaaggagttggtgcagcttgagtgccaaagatgggcaagcaaaggggtgaatataaagtatgaggttagggacaataggaatgggtacaaagcaggggctctcaaagaaggcatgaagcgtagctacgtgaaacagtgtgattgcgttgctatctttgacgctgattttcaaccagagcctgatttcttgtggcgcaccgttccattcctggtgcacaatcccgagctagccctcattcaagcgcggtggaaatttgtgaatgccgatgaatgtttgatgaccagaatgcaagagatgtcactagattaccattttactgtggaacaagaagtggggtcttccacttacgccttctttggtttcaacggaactgctggagtatggagaatttcggctttgaatgaagctggtggatggaaggataggaccacagtggaagatatggacctggctgtgcgagccagtctcaaaggatggaaattcttatacttgtctgacttgaaggttaaaaatgaattgccaagtacattcaaggcataccgctaccaacagcaccgttggtcatgcgggccagccaatctctttaggaaaatggtcatggagatcataaacaacaagaaagtgtcattgtggaagaagatacacgtgatttacagcttcttctttgttcggaaggtggtagcacacatcaacacgtttgtgttttattgcattgtattaccttcaacagttttggtgcctgaggtggtggtcccaaagtggggtgctgtctatatcccttccatcatcacctttctaaatgcagttggaactccaaggtcacttcatttacttgtcttctggattctctttgagaatgtcatgtctctgcatcgaacaaaggcaacgattattggtctactagaggctagtcgagtgaacgaatgggttgtcactgaaaaacttggtgatgctctcaaggctaaagcaggaggaaaagcacttaaaaagccaagattcagaattggagacaggattcacttgttagaacttggtgtggcattctacctcttcttttgtggctgctatgatgttatgttcgggaaaaaccatttcttcatcttcctctttatccaagcatttgccttcttcatcatggcatttggatatgttggcaccattgttcccaactcctagaaggacttggtatttcttcattcggctatttcagctctgtgccttcatatcaacgtgtattatagtgttttcaacatagttctggcaagttacagcttgttagtgtaaaagaaagggtggtcattctttaaggtcttgcataatcggagttggtgactctaaagagatagttttcttgtgaatattctgctcaaagatatataaggaaattacggaagttcttctcatgaaagggaagtatacagaacaagaacgcatcaatcaagaggcatggatcctcaggagcaaacatctttgattggatggattgtttataagattttgtagctttttttaacttttattttgcttttctttacattgtatttgtttgaagtaataaacagcttcaagaaatgggataatacacgaagttccattttgtatttcttcaatgtcagacaaatttgacaggaatgactatatgggagcagagatgagccttttgaagtgcaag

SEQ ID NO: 1646 - DNA, 2535 bp, Glycine max
ttttctctttcttttgttggtttgtttgttccttttgttgtacgttctcctttgttctcttcttccgcatttggtacatgcggtgttctacttctctcttggtttgataacaggatttgacacaagtgttgtggtctcccatttcaggagaatcactcactggcataatatagagcttgttaaaagcaaaaaaaaaaaaaaaagtgaagtgttttgagatctggcatgttatccttttctctctagctttaatttctttgtgggggtgtgtatgtgctagagtaactgacattccagctctgcttcctttgttttgcgtggcccagaagcaaaataacaatcaccaaaagaaaaaatacatatatattccacccaagtgattcttttaaacccttttcgatccaccattctcaccttgttgagcttggcctagctagctttgcttcccactcctcactagttaactctcttttattatttttctgacaccaagcttgatcaaaacgtacggttccaatggatcgcttttcttccagtaccattctccccgaagcgtttcaaggtgccaaagatgacttcaccatgcagcttgcattggtgtggaaccaaatcaaagcgccactgattgtcccgttgctgagactagcagtgtttctgtgcttgatcatgtcggtgatgatgttcattgagagagtctacatgggcattgtcatcactctggtgaagttgtttgggagaaagccagagaaacgttacaagtgggagccaatgaaggacgacattgagttgggaaactcttgttacccaatggttcttgttcaagtccccatgtacaacgaaagagaggtttatcagttgtctattggagcagcatgtgggctttcttggccttcagataggatcatcatacaagtccttgatgactccactgacccaacaatcaaggagttggtgcagcttgaatgccaaagatgggcaagcaaaggggtgaacataaagtatgaggttagggacaataggaatgggtacaaagcaggggctctcaaagaaggcatgaagcgtagctacgtgaaacaatgtgattgtgttgctatctttgacgctgattttcaaccagagcctgatttcctgtggcggaccgttccatttctcgtgcacaatcccgaattagccctcattcaagcacggtggaaatttgtgaatgccgatgaatgtttgatgacccgaatgcaagagatgtcactagattaccattttactgtggaacaagaagtggggtcttccacttacgccttctttggtttcaacgggacagcgggagtatggagaatttcggcgcttaatgaggctggtggatggaaggataggaccacagtggaagatatggacttggccgtgcgagccagtctcaaaggatggaaattcttatacttgtctgacttgaaggttaaaaatgagttgccaagtactttcaaggcctaccgctaccaacagcaccgttggtcttgtggtccagccaatctttttaggaaaatggtcatggagatcataaataacaagaaagtgtcattgtggaagaagatacatgtgatttacagcttcttctttgttcggaaggtcgtagcacacataaacacgtttgtgttttattgcattgtattacctgcaacagttttggtgcctgaggttgtggtcccaaagtggggagctgtctatatcccttccatcatcactattcttaatgcagttggaactccaaggtcactccatttgatggtcttctggattctctttgagaatgtcatgtctctgcatcgaacaaaggcaacgattattggtttacttgaggcaagtcgagtgaacgaatgggttgtcactgaaaaacttggtgatgctctcaagactaaagcaggaggtaaagcacctaaaaagcctcgattcaggattggagacaggattcacttgttggaacttggtgtcgcattctacctcttcttttgtggctgctatgatattatgtttgggaaaaaccacttcttcatcttcctctttatccaatctttggccttcctcatcatggcatttggatatgttggcaccattgttcccaactcctaagaaggattcggcacttcattcggctatttcagcttctgtgccttcatgtcaacgtgtattgtagtgttttcaacatagttctggaaaatcacagcttgttactataaaaaagaaagggtggtcattcttcaaggtgttgcataatcagagtcagtgactccaaagagttacttttcttgtgaatataccgcaaagatatataagcaaattactgaaattcttctcatgaaaggtaagtatacagaacaagatcgcagcaatcatgtggcatcgatcctccggggagcaaacattggatggattgtttataagattttgtagttttttttttttaacttttgcttttctttacattgtatttgtttgaagaaataaacagcttcaagaaatgggataaaatacacagtttcattttgc

SEQ ID NO: 1647 - DNA, 2524 bp, Glycine max
ctaaaaacaaaaacattctctcccattcctcaatcctcccccttagcccttcattttctttttctttcttttgttggtttgtttattcctttattctctgcttctgcattttgtacatgcggtgttctatttctcttggtttgataacaggatttggcacaagcgttgtggtctccccatttcaggagaatcatcactcattgccataatatagagcttgttaaaagcaaaagaaagaaaagtgaagtgttttgagatctggcatgttatccttttctctctagctttctttttgagggggtgtattgtgctagagtaactgacattccagctctgcttcctttgttttgcgtggcccagaagcataataacaatcaccaaaagaaaaaaatatattccaccgaagcggttcttttaaacccttttcgatccaccacttgagcttggcctagctagctttgcttcccattcctcacttaacttcaaaacggttccaatggatcgtttttcttctagtaccattctccccgaagcgtttcaaggtgccaaagatgacttcaccatgcagcttgcattggtctggaaccaaatcaaagcgccactcattgtcccgttgctgagaataacagtgtttctgtgcttgatcatgtcggtgatgatgttcatcgagagggtctacatgggcattgtcatcactctggtgaagttgtttgggagaaagccagagaaacgttacaagtgggaaccgatgaaggacgacatagagttgggaaactcttcttacccaatggttcttgttcaagtccccatgtacaacgaaagagaggtttatcagttgtctattggagcagcatgtgggctttcttggccttcagataggatcatcatacaagtccttgatgactccactgacccaacaatcaaggagttggtgcagcttgaatgccaaagatgggcaagcaaaggggtgaacataaagtatgaggttagggacaataggaatgggtacaaagcaggggctctcaaagaaggcatgaagcgtagctacgtgaaacaatgtgattgtgttgctatctttgacgctgattttcaaccagagcctgatttcctgtggcggaccgttccattcctcgtgcacaatcccgaattagccctcattcaagcacggtggaaatttgtgaatgccgatgaatgtttgatgaccagaatgcaagagatgtcactagattaccattttactgtggaacaagaagtggggtcttccacttacgccttctttggtttcaacgggactgcgggagtatggagaatttcggcgctgaatgaggctggtggatggaaggatagaaccacagtggaagatatggacttggctgtgcgagccagtctcaaaggatggaaattcttatacttgtcagacttgaaggttaaaaatgagttgccaagtactttcaaggcctaccgctaccaacagcaccgttggtcttgtggcccagccaatctttttaggaaaatggccatggagatcataaacaacaagaaagtgtcattgtggaagaagatacatgtgatttacagcttcttctttgttcggaaggtcgtagcacacatcaacacgtttgtgttttattgcattgtattacctgcaacagttttggtgcctgaggttgtggtcccaaagtggggagctgtctatatcccttccatcatcactattctaaatgcagttggaactccaaggtcactccatttgatggtcttctggattctctttgagaatgtcatgtctctgcatcgaacaaaggcaacaattattggtctacttgaggccagtcgagtgaacgaatgggttgtcactgaaaaacttggtgatgctctcaaggctaaagcaggaggtaaagcacctaaaaagcctcgattcaggattggagacaggattcacttgttggaacttggtgtcgcattctacctcttcttttgtggctgctatgatgttatgttcgggaaaaaccatttcttcatcttcctctttatccaatcttttgccttcctcatcatggcatttggatatgttggcaccattgttcccaactcctagaagggtttggcacttcattcggctatttcagcttctgtgccttcatatcaacgtgtattatagtgttttcaacatagttctggctaatcacagcttgttagtataaaaaagaaagggtggtcattctttaaggtgttgcataatcagagtcagtgactctaaagagttacttttcttgtgaatatactgcaaagatatataagaaattactgaaattcttctcatgaaagggaagtacacagaacaagaacgcagcgatcatgtggcatcgatcctactacggggagcaaacattagatggattgtttatatgatattgtagggttttttttgttttaacttttgcttctctttacattgtatttgtttgaagaaaaaaataagcagcttcaagaaatgggataagatacacaaacttccattttg

SEQ ID NO: 1648 - DNA, 1639 bp, Lotus japonicus
tttttctctgttctgttccaatggaacgcatttcttcaactacaactctcccatatgcattccaaggggctagggatgacattaccatgcagctttcgttgatttggagtcaaataaaagcaccattggttgtccctttgctgagattagcagtgtttttttgtttgatcttgtcggtgatgatgttcattgagagggtttacatgggggttgtcattactctgatcaaggtgtttggtagaaagccagagaagcgttacaaatgggagccaatgaaggatgacattgagttgggaaactcttcttacccaatggttcttgttcaaatccccatgtacaatgaaagagaggtttatcaactctcaattggagctggatgtgggctttcttggccttcagataggatcattatacaagtccttgatgactccactgatccaacaatcaaggagctggtgcagctggaatgccaaagatgggcaagcaaaggagtgaacataaagtatgaggtgagggacaacaggaatggatacaaagcaggggcattgaaagaaggcatgaaacatagctacgtgaagcaatgtgattttgttgctatctttgacgctgattttcagccagagcctgatttcttgtggcgcactgtgccattcttggtgcacaatcctcaactcgccctcattcaggctcggtggaaatttgtgaattcagatgaatgtttaatgacaagaatgcaagagatgtcactggattaccattttactgtggaacaagaagtggggtcttccacttatgccttctttggcttcaatgggactgctggaatatggagaatttcggcgctgaatgaagctggtgggtggaaggataggaccacagtggaagatatggacctggctgtacgagcaagtctcaaaggatggaaattcctatacttgtctgacttgaaggttaaaaatgaattgccaagtactctcaaggcctaccgctaccaacagcaccgttggtcttgtggaccagccaatctgttcaagaaaatggtcttggagattgtaagaaacaagaaagtgtcattgtggaagaagatacatgtgatttacagttttttctttgttcggaaagtcgtagcacacatcaacacatttgtgttctattgcatcatattacctgcaacagttttggtgcctgaggttgtggttccaaaatggggagctgtttacatcccttctgttatcacaattctaaatgcagttggaactccaaggtcactacatttaatggtcttctggattctctttgaaaatgttatgtctctgcatcgaacaaaggcaacgattatcggtctactcgaggctagtcgagtgaatgaatggattgtcactgaaaagcttggagatgctctcaaggctaaagcaggaggtaaagcacccaagaagcctagattcagggttggagacagggttcacatgttagaacttggtgttggattctacctcttcttttgtggctgctatgatgttatgtttgggaaaaaccactacttcatctacctatttatccaagcatttgccttcttcatcatggcatttggatatgttggcacctttgttcccaactcctagaagcacttggcaattct

SEQ ID NO: 1649 - DNA, 2578 bp, Medicago truncatula
ttgcaatgtaccatatagagaactcctaaataaacaaaataaaaaacattctcttctctcccatttcccctcttatatatctcttctctcttctatttcctctcgattattattatttttttctttcacattttcttttgttatctacttgtgctttttataaatgtattgttctgcttctcttttcatttgatcacagaagcagcagaacataatttgactttccacacaagtctagttctgtggccaggttaatatttccatttcagatgaagcatacctagtcacatgaaaagctaaaaaaagttgtttgttagttttgagatctaggaactggtttttctttactctctagagtagagtaactcacattgttttgcgtggaccagaagcaaaacataacaatttattacaaaacaaaaacaaatattcctgtttcttaacaaagttgattcctttaaactcttttgtatctattagtgtttgtcttcaaccattgttcacatctttgtctttctcattcttctcttttgtttttgtcaaaaactactatttcaaatggatcgtttttcttctactactatcccttttgcattacaaggagcaaaagatgacctaaccatgcagatttctttgatttggagccaaatcaaagctccattaatcgttccattactaagaatatcagtgtttttgtgtttgataatgtcggtgatgatgttcattgagagggtttatatgggtgttgtcattactcttgtgaagctatttggaagaaaacctgaaaaacgttacaaatgggaaccgattaaggatgatattgagttagggaactcttgttatcctatggttcttgttcaaatacctatgtacaatgaaagagaggtttatcaattgtcaattggagctgcatgtggtctttcatggccttctgataggatcattatacaagttcttgatgactccactgacccaacaatcaaggagttggtgcaactagaatgccaaagatgggcaagcaaaggagtgaatataaagtatgaagttagggacaatagaaatggatacaaagcaggggctttaaaagaaggaatgaagcatagctatgtgaagcaatgtgatcatgttgcaatatttgatgctgattttcaaccagagcctgattttttgtggcgtaccgtaccatttatggtgcataatcctgaaattgggcttattcaagctcgttggaaatttgtgaattcggatgaatgtatgatgactagaatgcaagagatgtcactagattaccattttactgtggaacaagaagtggggtcttccacttatgccttctttggcttcaacgggactgcgggagtgtggagaatttcggcgctgaacgaggctggtggatggaaggataggaccacagttgaagatatggacttggctgttagagctagtctcaaagggtggaagttcttatacttgtcaaacttgaaggttaaaaatgaactgccgagtactttcaaggcctaccgttaccaacagcatcgttggtcttgtggaccagccaatcttttccgaaaaatggtcttggagattattagaaacaagaaagtgtccttgtggaagaagatacatgtaatttacagtttcttctttgttcggaaagtgatagcacacatcaatacgtttgtgttttattgcattgttctacctgcaacagttttggtacctgaagttgcagtcccaaaatggggagctgtttatattccttcagttatcactcttcttaatgcagttggaactccaaggtcactccatttactcgtcttttggattctatttgagaatgtcatgtctctgcatagagcaaaggcaactgttattggtctactggaggctagtcgagtgaatgaatggattgtcactgagaaacttggagatgctctcaaggctaaagcagggactaaagcactcaagaagcctcgattcaggattgaagacaggattcacttgttagaacttggcgttggaatgtatctcttctttatcggctgctacgatgtcatgtttgggaaaaaccacttcttcatctttctctttatccaagcaatcgccttcttcatcatggcatttggatatgtcggaaccttcgttcccaactgaagaaggacttggtgattcttcaatcagcaatttcatcttctgttgattcaatattgaacacgttgtaatatattgcgttttcagcatacttctcgtaaattatagcttgttagtttaaaggaaaagattgttattctttgaggttttgcataagggtcagtgactcttgaagagtttagttttcttgtgaatattcaaaaaagacagaaaatatatgaagtccttctcatggaagataagtccacagaacaagaacaaggcagcagtctactgacatcgatccttagggaagcaataatgttgtattggatggattgtttataataagattttgtagttcattttgatttcattttttttcttgaagttgtatttgttggaaaaataagtcgcttcaagaaattgataaaatacataaagttcc

SEQ ID NO: 1650 - DNA, 2159 bp, Arachis hypogaea
gagagagagagagaaaaaggtgttttcatattgagatctcatctagctagctacctacacatagtacatagtgtcactgacattattccagctccgtcaattcatccattgttttgcgtgacccagaagaaaattacactaacaacacacgcaccaaaaagtgaaatacaaataaataaataaatattcctgcttctttaacaaagattgttattagcttgttcttattataaacctctcttccactactttctcttgtgtgtgtgtgtgtgtttgtctcttgaatatggatggggtttcgtttgaaggcgcaaaggatgacataacaatgcagtttgcaatggtgtggagccagatcaaagcgccattgatagttccaatgctgaggatcgcggtgtttttatgcttgatcatgtcggtgatgatgttcatagagagagtgtatatgggcattgtgattagtctcgtgaaattgtttggaagaaggcctgagaagcgttacaagtgggagccaatgaaggacgatgttgagttaggaaactcttcttaccccatggttcttgttcagattcctatgtacaatgaaagagaggtttatcagctttcaattggagctgcatgtggactctcttggccttctgataggatcgttgtacaagttcttgatgactccactgatcaagcaatcaaggaattggtgcagatagaatgccaaagatgggcaagcaagggtgtgaacataaagtatgaagtgagggacaacaggaacggatacaaagcaggggctctcaaagaaggcatgaaacgaagctatgttaagcaatgcgattacgttgccattttcgacgctgattttcagcctgaacctgatttcttgtggcgaaccatcccattcttagtgcacaatcctgagcttgctctcattcaggctcgttggaaatttgtgaattccgatgaatgtttgatgaccaggatgcaagagatgtcactggattaccatttcacagtggaacaagaagtgggctcttccagttatgccttctttggtttcaacgggactgctggagtatggagaattgcggcgctaaatgaggctggtgggtggaaagataggaccacagtggaggatatggaccttgctgtccgagctagtctcaagggatggaaattctgttacctctccgatttgaaggttaaaaatgagttgccaagtactttgaaggcctaccgttaccaacagcaccgttggtcttgtgggcccgccaatcttttcaggaagatggttttggaaattatcagaaacaagaaagtgtcaacttggaagaaggtacatgtgatttacagcttcttcttcgttaggaaagttatagcacacatcaacacgtttgtgttctactgcatcgtgttacctgcgaccgttgtggttcctgaggttgtggttccaaaatggggtgctgtctatatcccttctgtcatcacccttctaaatgcagttggaactccaaggtcgctccatttacttgtgttctggattctctttgagaatgtcatgtctcttcatagaacaaaggcgacaattattggtttactcgaggctagccgagtcaacgaatgggttgtcactgaaaagcttggagatgctctcaagagtaaagccggaggtaaagtagcatcgaagaagcctcgattcaagattggagacaggtttcacttgttggaacttggtgtgggattttacctcttcttctgtggctgttacgatgttatgttcgggaagaaccactacttcatcttccttttcatccaagcaattgcgttcttcatcatggcatttggatatgttggcacctttgttcccacctcgtaaaactatttggctatgttcttcattcagtgaaatttttcagtttgtgccttcacttgtcaaatgcgttgtagtatacagggtctggcaaattacacagcatattagtataaaaagaaaagggtgataatttttttaaggttttgcataaacagagtctgtgactctttaaaagagtagatttccttgtgaatagcaaaaggcatataacggaagttaatggaggttcttcacctgggaaacaagtatacacaaaagacgaacacagcgtcgacagcatctatggtggattgtt

SEQ ID NO: 1651 - DNA, 2729 bp, Lupinus angustifolius
aaatcacccacaaagaaaaatagcttccataatcacaaaaacaacaaaattaaaatattctctccccttttttctctttgctcctcctttatttcttgtcccttctatatatataacatttccctcacttcccttatcatttatcattttcctttctcatctgatttttatcaatgtgttgttctgcttctcttttcttttgattaagaagcagaacaagatttaatattgttttttcatacaattgtgtttggttcaagacaacataaactcttgttcctttaccagattctagtctctatagaaccttgtttggttgtgtcaaaagaaaaaaaaagttgtgtattttatgatctagcattgttttttttttcattctcttaagcttttatctttgtgggttttgagctatagttactaacatttcatctcctataccattttgttgttttttgcttgaccaagaagcaaaataacaaataccataaagaaaaaatattcctttttctttaaccaaagtttgttcttttaaacccgttttctatataatcttgtttctacttattagcttccaatttattcattcaattccctctcttggaaagaacattttctaatggatcaactttcttctactactactattcttcctgaagcatttcaaggagcaaaagatgatattactatgcaactttctttgatttggagccaaataaaagcaccattgattgtccctttactaagaatatcagtggttttgtgcttatgcatgtctgttatgatgcttatagagagggtttatatgggaattgtgattagtttggtgaagttatttggtagaaaacctgagaagcgttataaatgggagccaatgaaagatgatgttgagttaggaaactcttcttatccaatggtccttgttcaagtccctatgtacaatgaaagagaggtttatcaactatcaattggtgctgcatgtggcctttcttggccttcagataggatcatcatacaaatccttgatgattccactgacccaacaatcaaggagttggtgcaactagaatgccaaagatgggcaagcaaaggagtgaacataaagtatgaggtaagggacaataggaatggttacaaagcaggggcactaaaagaaggcatgaagcgtagctatgttaagcaatgtgattatgttgctatctttgatgctgattttcaaccagagcctgattacttgtggcgcaccattcctttccttgttcacaataatgaactagccctcattcaagctcgttggaaatttgtgaattctgatgaatgtctaatgacccggatgcaagaaatgtcactggattatcattttactgtggaacaagaagtagggtcttccacttatgccttctttggcttcaacgggactgctggagtatggagaattgcggcactgaatgaagctggagggtggaaggataggaccacagtggaagatatggacttggctgttcgagctagccttaagggatggaagttcttatacttgtctgatttgaaggttaaaaatgaattgccaagtacattcaaagcctaccgttaccaacaacatcgttggtcttgtggaccagcaaatcttttcagaaaaatggtcatggagattataagaaacaagaaagtgacattgtggaagaagattcatgtgatttatagcttcttctttgttcgaaaagttgtagcacatatcactacatttgtgttttattgcatcatattacctgcaacagttgtggtacctgaggttgtggttccgaaatggggagctgtttatatcccttcaatcattacccttctaaatgcagttggaactccgaggtcacttcatttactggtattctggattctctttgagaatgtgatgtcactgcatcgaacaaaggcaacaattatcggtctgctcgaggcgagtcgagtgaatgaatggattgtcactgaaaaacttggagatgctctcaagggtaaagcaggagtaaaagcaccaaagaagcctagattcagaattggagacaggattcacttgttagaaattggtgtcggattctacctcttcttcatcggcgtctacgatgttatgttcgggaaaaaccacttcttcatctacctttttatccaagcttttgcctttttcatcatgggatttggttatgttggcacctttgttcctagctcctagaaggacttgaaaattcttcattcaaagatttcattttctatgcattcaatatcaacatcattgtaatatattgtgttataagcttagtataagaaaaaggggtgtcattctttaaggtttttttgcataatgactctaaaaagagttaagtagttttgttgtgaatattaagcaaaagatataaggaaattcatgaagttcttttcctcatagaagtgatagcagtatttactggcatggatcctctgtggggcaaacatgtttgattggatggattgtttataagattctgtagcttttttcctttgtaattgtttttggcttttgcttttgctttttctttagattgtatttgtttgaagaaataatcagcttctagaaattgaataaaatacaagtagttgcaatgttgcatcttttttcaatgtgttcactctttgtttcaatcatctatccattattatgtatcactctctttttcatcaatacaagaaaacagttatcttac

SEQ ID NO: 1652 - DNA, 2965 bp, Cicer arietinum
ctgcaactcagtactataaaaagcactcaaagagaaatagaagaatgcaatgcaccatatagagacctcctaaataaaacacaaaaataaaaaacattattttctctcccatttcctctcttacctcttcttccatttcctgtactttttccgccttattttttttgtatgtttgttcctttcacattttcttttgttctttgcttctgctttttaccaatgtgttgttctgcttctcttttcatttgattacagaagcagaacataatttgacttttcacacaagtcttgtttttttggccatgatccatatatccattttagaagaaactcgttttggtaaatattagagacatacttagccatatcaaaagctaaaaaaaaaattgttttttttttagatctaacattgtttttatttctctctatagtcactgacattccagctctgcttccattcttttgcgtggaccggaagcaaatcataaaaatttataacaaaacaaatattcctgtttctttaccaaagttgattcctttaaacccttttggatcttgtagtgtaattttgtcttaaaccactgttcacttctttgtcttcttgttcgtcttctcttttgtttttgtcaaaacttttattcaaatggatcatctttcttctatcactactatacctgatgcatttcaaggtgcaaaagatgacatcaccatgcaatttttgttgatttggagtcaaataaaagcgccattgattgttccattactaagactagcagtatttttgtgtttaatcatgtcggtgatgatgttcattgagagggtttacatggggattgtgattacacttgtgaaactatttgggaaaaaaccagaaaaacgttacaaatgggagccaataaaagatgatattgagttggggaactcttgttaccctatggttcttgttcaaatccctatgtacaatgaaagagaggtttatcaattgtcaattggagctgcgtgtggtctttcatggccttctgataggatcattgtacaagttcttgatgactccactgacccaacaatcaaggagttggtgcagctagaatgccaaagatgggcaagcaaaggtgtgaacataaagtatgaagttagggacaatagaaatggatataaagcaggagcactcaaagaaggaatgaaacatagctacgtgaaacaatgtgatcttgttgcaatctttgatgctgattttcaacctgagcctgatttcttgtggcgtagcgttccatttttggttcacaatcctgaacttggccttattcaagctcgttggaaatttgtgaatgcggatgaatgtatgatgactagaatgcaagagatgtcactagattaccattttactgtcgaacaagaagttggctcttccacttatgccttctttggcttcaacgggactgcgggagtgtggagaattgcggcgctgaatgaggctggtgggtggaaagataggaccacagttgaagatatggatttggctgttcgagctagtctcaaaggatggaaattcttatacttgtctaacttgaaggttaaaaatgaattgccaagtactttcaaggcttatcgctaccaacaacataggtggtcttgtgggccggccaatctttttagaaaaatggtcatggaaattattagaaataagaaagtatcactgtggaagaagatacatgtaatttatagcttcttctttgttcggaaagtcatagcacacatcaatacgtttgtgttttattgcattgtactacctgcaacagttttggtacctgaggtttcagtcccaaaatggggagctgtttatatcccttcactcatcactcttctcaatgcagttggaactccaaggtcacttcatttattagtcttttggattatgtttgagaatgtaatgtctttacatcgagcaaaggcaactattattggtctattggaggctagtcgagtgaatgaatggattgtcaccgagaaacttggagatgctgtcaagacaaaagtaagaactaaagcactgaagaagcctcgttttaagattcaagacaggattcacttgttagaacttggtgttggaatgtatctcgtcatttgtggctgctacgatgttatgtttgggaaaaatcacttctacatctttctttttatccaagcaatggccttcttcataatggcgtttggatatgttggaacttttgttcccaactcataaaaggacttggcatttcttcattcggcaatttcattttttgtgccttcaatatcaaatgtggtgtattatatagtgtttttagcatagttctggcaaactacagcttgttagtataaaggaaaagattgttattctttgagggtttgcataagggtcagtgacttgtgaagagtttagttttcttgtgaatattcagcaaagacttataaagaaattatataaagttcttctcgtggaagagaaatctacaaaacaagaatgcagcagcaagctacttgcatcgatttcttcttggggaagcaaaaatgttttgttggatggattgtttataagattttgtagttcaatattttttcccagacttgtatttgtttgaagaaataagcagctcaagaaatttgacaaaatacataaagttccatttggcatctccttttcatgtgtctcctctattttagtaatatttgatagagatgtaaattggggaagaaatgtgtcatgtgtcctttgatgtgcaggacactattccttatagaaatcaaataaaagaccggtggatgttacaccaaagaaagtaaataattaattaattttaaaaaaattaaattggcctgatttatatgattgaagatgtgattacatgtttcatgtaactctaaccattcattgtatcacaagaataatgagcaaaagatagtgaaatcgttggacacaattttt

SEQ ID NO: 1653 - DNA, 2404 bp, Trifolium pratense
atcagcttctgcttttaataaatgtgctgttctgtttctcttttcatattttgacttttcacacaagtcttgttttcatttccatttctaaagaaacatgcatagctatatgaaaagctaaaaaatttgcttgttaatttttgagatctactataacattgttttgcttggaacagaagcaaaacataacaatttttaccaaaaacaaatattcttgttcctttaaacccttttggatctagtagttctcaaccattgtttcatatctttgtcttcttgagttcttgtctttctttacattcttctatcaaacaaaactactactttgaaatggatcatttttcttctactactacttctactatcccttttgcattacaaggagcaaaagatgacataaccatgcaaatttctttgatttggagtcaaatcaaagcaccattgatagttccattactaagaatatcagtgtttttgtgtttaataatgtcggttatgatgtttattgaaagagtttatatgggtgttgtcattactcttgtgaagctatttggaagaaaacctgaaaaacgttacaaatgggaaccaattaaggatgatattgagttaggaaactcttgttatccaatggttgttgttcaaatccccatgtacaatgaaagagaggtttatcaattgtcaattggagctgcatgtggtctttcatggccttctgatagaatcattatacaagttcttgatgattctactgacccaacaattaaggaattggtgcaactagaatgccaaagatgggcaagcaaaggtgtgaatataaagtatgaagttagagacaatagaaatggttacaaagcaggggcattaaaggaaggaatgaagcatagctatgtgaagcaatgtgattttgttgcaatctttgatgctgattttcagccagagcctgatttcttatggcgtacagtgccatttatggtccataattctgaacttgggcttattcaagctcgatggaaatttgtgaatgccgatgaatgtatgatgaccagaatgcaagagatgtcattagattaccattttactgtggaacaagaagtgggctcttccacttacgctttctttggcttcaatgggactgcgggagtttggagaatcgcagcgctgaatgaggctggtgggtggaaagataggaccacggttgaagacatggacttggctgttcgagctagtcttaaaggatggaaattcttatacttgtctaacttgaaggttaaaaatgaattgccaagtactttcaaggcctaccgttaccaacaacatcgttggtcttgcggaccagccaatcttttccgaaaaatggtcatggagataattagaaacaagaaagtgaccttgtggaagaagatacatgtcatttacagcttcttctttgttagaaaagtgatagcacacatcaatacatttgtgttttactgcattgtactaccggcgacggttttggtacctgaggttgcggtccctaaatggggagctgtttatatcccttcggttatcacacttctcaatgcagttggaactccaaggtcactccatttacttgtcttttggattttatttgagaatgttatgtctctacatcgagcgaaggctaccgttgttggtctacttgagactagtcgagtgaatgaatgggttgtgactgagaaacttggagatgctcttaaggttaaagcaggcactaaagcgctcaagaagcctcgattcaggattgaagacagaattcacttgttagaacttggtgttgggatgtacctcttctttattggttggtacgatgttatgttcgggaaaaaccactacttcatctttctctttatccaagcattcgccttcttcatcatggcatttggatatattggaacattcgttccgaactcctagaacgacttggcatttcttcattcaacaaaatcaccttccgtggatacaatattaaacgcgttgtaatatatagtgttttcagcatagttctggcaaattatagcgtgttagtttaaaggaaaatattgttattctttgaggttttgcataaggactctggaagagtttagttttcttgtgaatattcaacaaagacttatatataaagaaattatataaagttcttctcatataagtgaagtctatagaacaagaacacaacaagaatctactgacatggatcttcatggaagcaataatgttttattggatggattgtttataagattttgtaggtcttttctttttgaaattgtatttgtttgaagaaataattagtttgaagaaattgataaaacacataaagtttcattttgcatatatttttaaattttgtatcctctatgttagtcatatttgagagata

SEQ ID NO: 1654 - DNA, 2455 bp, Trifolium pratense
aataataaatgtgctgttctgcttctcttttcattttgtcatagaaccagaacatattttgacttttcacacaagtcttgttttcatttccatttcaaaagaaacatgcatgaaaagctaaaagaaatttcttgttaatttttgagatctacaacattgttttgcttggactagaagcaaaacataacaatttttaacaaaaacaaatattcttgttcctttaaacccttttggatctagttgtgttttgtcctcaaccattgtttcatatctttgtcttcttgagttcttgtctttctttacattcttctatcaaacaaaactactactttgaaatggatcatttttcttctactactacttctactatcccttttgcattacaaggagcaaaagatgacataaccatgcaaatttctttgatttggagtcaaatcaaagcaccattgattgttccattactaagaatatcagtgtttttgtgtttaataatgtcggttatgatggttattgaaagagtttatatgggtgttgtcattagtcttgtgaagctatttggaagaaaacctgaaaaacgttacaaatgggaaccaattaaggatgatattgagttaggaaactcttgttatccaatggttgttgttcaaatccctatgtacaatgaaagagaggtttatcaattgtcaattggagctgcatgtggtctttcatggccttctgatagaatcattatacaagttcttgatgattctactgacccaacaattaaggaattggtgcaactagaatgccaaagatgggcaagcaaaggtgtgaatataaagtatgaagttagggacaatagaaatggatacaaagcaggggcattaaaagaaggaatgaagcatagctatgtgaaacaatgtgattatgttgctatctttgatgctgattttcagccagagcctaatttcttatggcgtacagtgccatttatggtgcataatcctgaacttggtcttattcaggctagatggaaatttgtgaatgctgatgaatgtatgatgaccagaatgcaagagatgtcactggattatcattttacagtggaacaagaagtgggctcttccacctacgccttctttggcttcaatgggaccgcgggagtttggagaattgcggcgctgaatgaggccggtggatggaaagataggaccacggttgaagatatggacttggctgttcgagctagtctcaaaggatggaaattcttatacttgtctaacttgaaggttaaaaatgaattgccaagtactttcaaggcctaccgttaccaacaacatcgttggtcttgcggaccagcaaatcttttcagaaaaatggtcatggagataattagaaacaagaaagtgtccttgtggaagaagatacatgtcatttacagcttcttctttgttagaaaagtgatagcacacatcaatacatttgtgttttactgcattgtactaccggcgacggttttggtacctgaggttgcggtccctaaatggggagctgtttatatcccttcggttatcacacttctcaatgcagttggaactccaaggtcactccatttacttgtcttttggattttatttgagaatgttatgtctctacatcgagcgaaggctaccgttgttggtctacttgaaactagtcgagtgaatgaatgggttgtgactgagaaacttggagatgctcttaaggttaaagcaggcactaaagcgctcaagaagcctcgattcaggattgaagacagaattcacttgttagaacttggtgttgggatgtacctcttctttattggttggtacgatgttatgttcgggaaaaaccactacttcatctttctctttatccaagcattcgccttcttcatcatggcatttggatatattggaacattcgttccgaactcctagaacgacttggcatttcttcattcaacaaaatcaccttccgtggatacaatattaaacgcgttgtaatatatagtgttttcagcatagttctggcaaattatagcgtgttagtttaaaggaaaatattgttattctttgaggttttgcataaggactctggaagagtttagttttcttgtgaatattcaacaaagacttatatataaagaaattatataaagttcttctcatataagtgaagtctatagaacaagaacacaacaagaatctactgacatggatcttcatggaagcaataatgttttattggatggattgtttataagattttgtaggtcttttctttttgaaattgtatttgtttgaagaaataattagcttcaagaaattgataaaacacataaagtttcattttgcatatattttttaattctgtatcctctatgttagtcatatttgaaagatataaattgtgggaaagatacatttgatgttacaccaaagaataacga

SEQ ID NO: 1655 - DNA, 2119 bp, Trifolium pratense
tttttacattcttctatcaaacaaaacaaaactactagtttcaaatggatcatttttcttctactactactataccttttgcattacaaggagctaaagatgacataaccatgcaattttctttgatttggagtcaaatcaaagcaccattgattgttccattactaagaatatcagtgtttttatgtttaataatgtcggttatgatggttattgaaagagtttatatgggtgttgtcattagtcttgtgaagctatttggaagaaaacctgaaaaacgttacaaatgggaaccaattaaggatgatattgagtttggaaactcttgttatccaatggttgttgttcaaatccctatgtacaatgaaagagaggtttatcaattatcaattggagctgcatgtggtctttcatggccttctgatagaatcattatacaagttcttgatgattccactgacccaacaattaaggaattggtgcaaatagaatgccaaagatgggcaagcaaaggtgtgaatataaagtatgaagttagggacaatagaaatggatacaaagcaggggcattaaaagaaggaatgaagcatagctatgtgaaacaatgtgattatgttgctatctttgatgctgattttcagccagagcctaatttcttatggcgtacagtgccatttatggtgcataatcctgaacttggtcttattcaggctagatggaaatttgtgaatgctgatgaatgtatgatgaccagaatgcaagagatgtcactggattatcattttacagtggaacaagaagtgggctcttccacctacgccttctttggcttcaatgggaccgcgggagtttggagaattgcggcgctaaatgaggctggtgggtggaaagataggaccacggttgaagatatggacttggctgttcgagctagtctcaaaggatggaaattcttatacttgtctaacttgaaggttaaaaatgaattgccaagtactttcaaggcctaccgttaccaacaacatcgttggtcttgcggaccagccaatcttttcagaaaaatggtcatggagataattagaaacaagaaagtgtcattgtggaagaagatacatgtcatttacagcttcttctttgttagaaaagtcatagcacacatcaatacatttgtgttttattgcattgtgctgcctgcaacagttttagtacccgaggttgcggttcctaaatggggagctgtttatatcccttcagttatcactcttctcaatgcagtcggaactccaaggtcactccatttacttgtcttttggattctatttgagaatgttatgtctctacatcgagcgaaggctactattgttggtctactggagactagtcgagtgaatgaatggattgtgactgagaaactcggagatgctcttaaggttaaagcaggaactaaagcactcaagaaacctcgattcaggattgaagacaggattcacttgttagaacttggtgttggaatgtacctcttttttatcggttgctacgatgttatgttcgggaaaaaccagttcttcatctttctctttatccaagcattcgccttcttcatcatggcatttggatatattggaacttttgttcccaactcctagaaggacttggcatttcttcattcaacaaaatcatcttctgtggattcaatattgaacgcgttgtaatatattgtgttttcagatttcagaatagttctggaaaattatagcgtgttagtttaaaggaaaagattgttattctttgaggttttgcataagggtcagtgactatggaagagtttagttttcttgtgaatattcaccaaagacttataaagaaagtatataaagttcttctcatgtaagtgaagtctacaaaacaagaattcaacaggaatctactgacttggatcttcatggaagcaataatgttttattggatggattgtttataagattttgtaggtcttttctttttgaaattgtatttgtttgaagaaataattagcttcaagaaattgataaaacacataaagtttcattttgcatatattttttaattctgtatcctctatgttagccatatttgaaag

SEQ ID NO: 1656 - DNA, 2097 bp, Lupinus angustifolius
ctctttagttttgtgaaaaaaacatttctaatggatcaactttcttcaactaatattctccctgaaacatttcaaggggccaaagatgacatttttatgcaatttgcattggtttggagccaaataaaagcaccattaatcgtccctttactaagaataggagtggttttgtgcttattcatgtctgtaatgatgctaatggagagactttacatgggcattgttattattttggtgaagttatttggtagaaaacctgaaaagcgttataaatgggagccaatgaaagatgatatggagttgggaaactcttcttacccaatggttattgttcaagtccctatgtataatgaaagagaggtttatcaactatcaattggagctgcatgtggcctttcttggccttcagataggatcattatacaagtccttgatgattccactgacccaataatcaaggagttggtgcaattagaatgtcaaagatgggcaagtaaaggtgtgaacataaagtatgaggtaagggacaataggaatggatacaaagcaggggctctaaaagaaggcatgaagcgtagctatgttaagcaatgtgattatgttgctatatttgatgctgattttcagccagaacctgattttttatggcgcaccattcctttcctagtgcacaattctgaactagccctcattcaagctcgttggaaatttgtgaattcaaatgaatgtttgatgactagaatgcaagaaatgtcactggattaccattttactgtggaacaagaagtagggtcttccacttatgcattctttggcttcaatggaactgcaggagtgtggagaattgcagctctgaatgaggctggtgggtggaaagataggaccacagtggaagatatggaccttgctgtaagagctagccttaagggatggaagttcttatacttgtctgatttaaaggttaaaaatgaattgccaagtactttcaaggcctaccgttaccaacagcaccgctggtcttgtggaccagcaaatcttttcaggaaaatggccatggagattataagaaataagaaagtgacattgtggaaaaagatatatgtgatctacagttttttcttcgttcggaaggttgtagcacacatcaacacatttgtgttttattgcattatattacctgcaacagttgtagtatctgaagttgaagttccaaaatggggtgctgtttatatcccttcaatcattacccttctaaatgcagttggaaccccaaggtcactccatttactggtattctggattctctttgagaatgtcatgtctctgcatcgaactaaggcgacaattattggtctactcgaagctagtagagtcaatgaatggattgttactgaaaaacttggagatgctctaaagggtaaagcaggaactaaagcaccaaagaagcctagattcagaattggagacaggattcacttgttagaacttggtgttggattctacctcttcttcatcggtgtctacgatgttctgttcgggaaaaaccatttcttcatctacctttttgtccaagcatttgccttcttcatcatgggatttggatatgttgggacatttgttcccaactcctagaaggactttgcaaaactcttcattcagcactttcagtatcaacaattttgtgatatattgtgtttcaagcttatatatgcaaaattaaagcttattagtataagaaaagggtggtgattctttaaggtttttgcataatcagagtcattgagtgactctaaaagagttaattagttttcttgtgaatattattaagcaaagttatataactaaattgaggaagttattctcatagaagtgatttatgcaagaagtgatagcagcattctactagcatcatcctctatgggacaaacatctttgattggatggattgtttataagattttgtagctttttcttttgtgattttttgtaaaacttctttgtagcttttatttacattgtatttgtttgaagaaataatcagcttcaaaaaattggttataatacacaaagttctaatattgcatctttctttatgtt

SEQ ID NO: 1657 - DNA, 2794 bp, Theobroma cacao
aaattaaaaaaaaaaaaaaaaaaaaaaaaaaagagagagaacaaatgttctgaaaatggaaatgagagtgagaaataaaattaaaaacacaacaaccagagaagagagagcttatataagacattgttctctctctcattttctatcgctcttattttttcttgctttttcaagtctctgcttctgtttttcttccgaataacagaagcagaaaaaaaaaaaaaaagaagcagttatcatcaggattttcatttttctttgttagagtaacgtacatttctgagatgtttagattaagaaagtagagggagtttttagcttgtgggttgctgcaaaatagtgggggggtgtttgagccagtgactggcatttttccagcttgctctacctccattgttttgcgtgaaccagaagcaaattcacaaagaaagaaacaaaagaagggaaatattccatctcctttgtcgaagaatgtcctttattatttaagcagatctagtgggttgttttcaagacctgtgtaaaatcatctttcactcttgttcttagcttcccatttggtcctcccctgtttttgctctgttttttgtttccttcttttaacttgagaaagccaggaaatggatcggctttcttcgacaaccattcttcctgatacattccagggaacgagagatgatttctccatgcaaatggcagtgatttggggtcagatcaaagcgccattgatagtaccattgttgagacttacggttatcgtttgtttgatcatgtctctgatgcttttcattgagagggtttacatgggcatagtcattatgctggtcaagctcttcggtagaaaaccagagagaagatacaaatgggaacccattaaagatgatgttgagttgggaaactcggcttatcccatggttctggttcaaattccaatgtacaatgaaagagaggtctatcaactgtcaattggggcagcatgtggcctctcatggccttctgatcggatcattattcaagtccttgatgattcaactgacccgacaattaaggacttggtggagttggagtgccaacgatgggccagcaaaggcatcaacatcaaatatgagataagagacaatagaaacggctacaaagcaggcgccctgaaagaaggcatgaaacgaagctacgtgaaacattgtgattacgtagtcattttcgacgctgatttccagccagaacctgatttcctttggcgtaccattcctttccttgttcacaaccccgaattagctttggttcaagctcgttggaaattcgtgaatgctgatgagtgcttgatgacaagaatgcaagaaatgtcactagattaccatttcactgtggaacaagaagtggggtcttccacttatgccttcttcggcttcaacggaactgctggagtgtggagaattgctgctttgaatgaggcaggaggatggaaagatagaaccacagtggaggatatggacttggcagtccgagctagtctaaaaggctggaaattcctttacctgggaagcctaaaggtgaaaaatgaattgcctagtacattgaaggcttatcgctatcaacagcaccgttggtcttgtggtcctgccaaccttttcaggaaaatggtgatggagattattacaaacaagaaagtttcctcatggaagaaggtacatgtaatctacagcttcttcgtggtcagaaagcttgttgcccacattgttacattcatattttactgcgttgtattacctgcaactgttctggtacctgaagttgaggttccaaagtggggagctgtttatattcctactatcattaccattctcaacgcagttggaactccaagatcgcttcacttattggtcttttggatcctctttgaaaatgtcatgtcattgcatcggaccaaggctacctttattggcctcttagaggctggtagagtgaatgaatggattgtcactgagaaactgggagatgctctcaaggctaaagcaggcacaaaggcacccagaaaacctcgtttcaggtttggagaaagactccacttgttagagctttgtgtcggagcttacctcttcttctgtggctgctatgatgttgtgttcgggaaaaaccactacttcatatatctttttgcccaagcaattgccttcttcattatgggatttggatatgttggcaccattgtccccaactcttagtgtgattcctgaagtagtcgttggtgtaattcttttggctactaagtaatcgccctcagcaggtctctctctccttcagcaacagagtatgtggcgtttatagggacattttcttgcaattttagtttcgtataaaaagacagggataaaaaacacggttattctttcaggttgagtataagaattcgagtatgttactcgaaacaagttagttctcttgtgaatatccaagaaattaaggaaaatacataacaaatgttgtaatggcaatgcgtcatacagagaagatgaggggcaaatgaaggcagtttctgggtttagacaccagatagatatagggaagattttggagtgaattgtttgcaattgtgatcttttctttctttctttctttcttgtagctcttcttttccccctctttcccattctgttgtggttgggatttgtttgagaaggaataaaataattggaaaagtgtaattttcaaagtcgattttccattcatctttgtctctctgctcctctctctctccacacaacacacacactgtgtggaagcatagtccagagaa

SEQ ID NO: 1658 - DNA, 2022 bp, Cajanus cajan
atggaagcgtttcaaggggcgagggatgacatttccttccaaattggcctgatttggagccaagtgaaggagccagtgatcgtgccactgctgagagtgtcagtgtttctgtgcttggccatgtctttgatgatgctggtggagagggtgtacatgggcttcgtcatttgcttggtcaagctctttggtcgaaaacccgagaagcgttacaagtgggagcctatgaaggacgacgttgagttgggaaattccatttatccaatggttttggtccaagtcccaatgtacaacgaaagagaggtttatcaactatcgattggtgccgcatgtggtctttcttggccttcagacagaatcatcatccaaattctcgatgattctactgacccaacaatcaaggaattggtgcaaatggaatgtagcagatgggcgagcaaaggggtgaacataaagtacgaggtgagggacaacagaaacggttacaaagctggggctcttaaagaaggcatgaaacgcagctatgtgaaacaatgtgattatgttgcaatctttgatgctgattttcaaccagagactgatttcctatggcgaactgtcccattccttgtcaacaaccctgaacttggtctcgttcaggcacgctggaagtttgtgaatgcaaatgaatgtttgatgaccaggatgcaagagatgtcactggattaccattttactgtggaacaagaagtggggtcttccacttacgccttctttggcttcaacgggactgcgggtgtatggagaatttcggctctgaatgaggctggggggtggaaggataggaccacagtagaagatatggacctggctgtccgagccagtctcaaaggatggaaattcttatacctagccaatttgaaggttaaaaatgaattaccaagtactctaaaggcctaccggtaccaacagcacaggtggtcttgtggaccagccaatcttttcaagaaaatgttcacggagattatgagaaacaagaaagtgtccttgtggaagaagatatatgtgatttacagcttcttctttgtccggaaggtcgtggcccacatcaacacttttgtgttctattgcattgtgttacctgcaacagttgtggtgcctgaggttgcggttcccaagtggggtgctgtgtatatcccttccattatcaccctcctaaatgctgttggaactccaaggtcactccacttactggtcttctggattctttttgagaataccatgtctctgcatagaacaaaggcgacaattattggtctactagaggctagtagagtgaatgaatggattgtcactgaaaagcttggagatgctctaaagggtaaaggtgggggtaaagcacccaagaagtttcgattcaagattggagaaaggattcacatgttggaacttctagttggattctacctcttcttctgtggctgctatgatatcatgttcggcaaaaaccgcttctacatattcctatatatccaatcaattgctttcttcatcatggcatttggatatgttggcactttcgttcccaactcctagaaggacttgacacacttgattcagatatctacatattgtaatagtgttcgcagtataatctgtggcattagaaattaaagcttgtgttagcataaatgaatgcgtggtcattcttcaaggttcccataatcagagtccgtgacccgaaacagttttttgtgaatattcaacaaagatgcataaggaaattacgtaagttattctcttggaattggaaatgaagcatacagaaaatcgatacagaagtctacaggcatcaatcatccctgggcaaacatatttgattggacagatggttattaagattttgtagttcttttttcttttctttttttatttttattttttattttataagacttttccttcttttgcctttctttacttgaatttgtttgaagaaataataaacagcttccaataaatggggtagattacagagtttcaagt

SEQ ID NO: 1659 - DNA, 1976 bp, Phaseolus vulgaris
atggaagcgtttgaaggggcgagggatgacatttcatcccaagtgggtctgatttggagccaagtgaaggagccagtgatggtgccactgctgagagttgcagtgtttgtgtgcttgggcatgtcgattatgatgttggtggagagggtgtacatggggtttgtgatttgcttggtgaagctgttcggtagaagacccgagaagcgttacaagtgggagtctctgaaggaggacgttgagttgggaaactctagttatcccatggtcttggtccaagtcccaatgtacaacgaaagagaggtttatcaactctcaatcggtgctgcttgtggcctttcttggccttcagacaggatcatcgtacaaattcttgatgattctactgacccatcaatcaaggagttggtgcaaatggaatgtagcagatgggcaagcaaaggagtgaacataaagtacgaagtgagggacaacagaaatgggtacaaagcaggggctctgaaagaagggatgaaacgtagctacgtgaagcaatgtgactatgtggccatatttgacgcggattttcaaccagaacctgatttcctctggcgaactgtcccattcctagtcaacaaccctgaacttggtctcgttcaggcacgctggaagtttgtgaatgccaatgaatgtttgatgacaagaatgcaagagatgtcactggattaccattttactgtggaacaagaagtggggtcttccacttacgccttctttggcttcaatggaactgcgggtgtatggagaatttcggcgctgaatgaagctggggggtggaaggatagaaccacagtggaagatatggacctggctgtccgagccagtcttaaaggatggaaattcttatacctcgccaatttgaaggttaaaaatgaattaccaagtactctgaaggcctaccggtaccaacagcacaggtggtcttgtggaccagccaatcttttcaggaaaatggtcatggagataataaggaacaagaaagtatccttgtggaagaagatatatgtggtttacagcttcttcttcgtccggaaggtcgtggcccacttaaacactttcgtgttctactgcattgtcttacctgcaacagttgtggtgcctgaggtggcggtacccaagtggggtgctgtttatatcccttccatcatcacactcctaaatgctgttggaactccaaggtcactccacttactggtcttctggattctctttgagaataccatgtctctgcatcgaacaaaggctacaattattggtctactagaggctagccgagtgaatgaatggattgtcaccgaaaaacttggagatgctcttaagggtaaaggtgggggtaaagcagccaagaagattcgtttcaggattggagacagaattcacatgctggaacttcttgttggattctaccttttcttctgtggctgctatgatgttatgttcgggaaaaaccggttctatatattcctatatattcaatcaattgctttcttcatcatggcatttggatatgttggcactatcgttcccaactcctaaaagaacttcagaacacttcattcagatatctacataatgtaatagtgctcattcacagtataatctgtgacattaaattaaagcttgtgttatgggtggtcattcttcaaggttctgcataatcagagtcgtggctcgaacagttttttgtgaatattcaacaaagatacataagaaaattacagaagttattcctttggaaatgaagtatacagaaaatgagtacagcactggcatcaatcttccctgggcaaacatctttgattggacagatggtttataagatttttgtagttctttttcttttttaattttataaatcatttccttctttacttgaatttgttcgaagaaataataaacatcttcaataaatgggatagattacagagtttcgtgttgaa

SEQ ID NO: 1660 - DNA, 2597 bp, Gossypium raimondii
agctttttaatagttctttttttttgagcactcatttttcaacttgttcattgtcctcccactctgcctctgtttttcttccaaacaacagagggtctagttggaataagaaaattatatgctatgtacatttctgcaaattagtgtgggtttttgaaccacttaagctctgctttcattgcttctggttcaagcaaaaaaccaacaaagattccatctctttttccaatggatgtactttaaatctaaacagatctagtgggttgttttcaaaatctgtttttgttagttgttctttgttctttccttctttttcctgttttgtttcttttacaatttagtcctcccctgttttttttcctcaaaatggatcggtttccttcaacaactatcttccccgacacaaccgatgatttgtcgatgcaaatggcagtgatttggggccaaatcaaagcaccattgatcgtgccattgttgaaactcgccgtcgtggtttgtttgataatgtctgtaatgctttttattgaaagagtttatatggggatagtcattgctttggtcaaactgtttggtcggaaaccagacaaaaggtttaaatgggaagccattaaagatgatgtcgagttggggaactcagcttatcctatggttctggttcaaatcccaatgtataatgaaagagaggtttatcaactgtccattggagctgcatgtggcctctcatggccttctgatcggatcgttattcaagtccttgatgactcaactgacccaacaattaaggatatggtggaattagagtgtcaaagatgggcaagcaaagggatcaacatcaagtatgaaataagggacaataggaatggatacaaagcaggggctttaaaagaaggcatgaaacacagttatgtgaaacactgtgactatgttgtcattttcgacgctgatttccagcccgaacctgatttcctttggcgaaccattcctttcctcgttcacaaccctgaattagctttggttcaagctcgttggaaattcgtgaatgctgatgaatgtttgatgacaaggatgcaagaaatgtcattagattaccactttactgttgaacaagaagtggggtcttccacctattcgttctttggcttcaatggaactgctggtgtatggaggattagtgctttgaatgaagccggtggatggaaagatcgaaccacggtcgaggacatggatttagctgttcgagctagtctcaaaggatggaaattcctttaccttggtagcctaaaggtgaaaaatgaattgccgagtacattgaaagcatatcggtaccaacagcatcgatggtcttgtggtccagctaaccttttcaggaaaatggtcatggagatcattaaaaacaagaaagtttcgacatggaagaaagtacatgtaatttacagcttctttgtggtcagaaagcttgttgcccacattgttacattcattttttactgtgttgttttacctgcaactgtacttgtgcctgaagttgaggttccaaagtggggagctgtttatattccttctatcattaccattctcaatgctgtcggaactccgaggtcatttcacttactggttttttggatcctttttgaaaacgtcatgtcgttgcatcgaactaaggctaccttcatcggcttattagaggctggtagagtaaacgaatggatcgtcactgagaaactcggggatgctcacaagtctaaagcagctgcaaaagcaccccgaaaaccccgtttccggttcggagaaagactccatgtgttagagctaagcgtcggagcttatctattcttctgcggctgctacgacgtcgtgttcggtaaaaaccattacttcatatacctttttgcacaagcaatcgccttcttcatcatgggattcggatatgttggcaccatcatccccaactcgtaatgcaactccttaaattagtccgtagtggccattatcatcatcgccggtgtaattcttttggctactaatgccatcaacaggtgattatgtggtgattataacaacatttccttgcaatttttagctttgtgtaaaaaaaacaaacaaaaatctaaaaagggttattcttttaaggttgagcataggatttttttttcgagttcgataactcgaaaaaaaaaaagttagttatctttgtgaatatccaagaaaattaagggaaatacagaaacatatgttgtaatggtaatgcatatgcatcatacagagaattataaggagctaatggaaggttgtttctgggttttgacccccaaaatagacaatatagagaagattttggagtgaattgtttgcatttttttttttctatttgtagcttttttttcttcttctttttttgtaattttcccatttatgttgtggttgggaatttgtttgagaaatgaaataaaaataatgagaaaagctttcattttcatatttgattctctgttgatctctttgtctgtttgttttacctatcaatctttgatttgagattggcttaggcttgcaagttgcttaaatcaaatatcaagatattcaaatttggtttgttt

SEQ ID NO: 1661 - DNA, 2079 bp, Gossypium hirsutum
gtttttcttccaaataacagagggtctagttggaataagaaaattatatgctatgtacatttctgcaaattagtgtgggtttttgaaccacttaagctctgctttcattgcttctggttcaagcaaaaaaccaacaaagattccatctctttttccaatggatgtactttaaatctaaacagatctagtgggttgttttcaaaatctgtttttgttagttgttctttgttctttccttctttttcctgtttttgtttcttttacaatttagtcctcccctgttttttttttcccaaaatggatcagtttccttcaacaactatcttccccgacacaaccgatgatttgtcgatgcaaatggcagtgatttggggccaaatcaaagcaccattgatcgtgccattgttgaaactcgccgtcgtggtttgtttgataatgtctgtaatgctttttattgaaagagtttatatggggatagtcattgctttggtcaaactgtttggtcggaaaccagacaaaaggtttaaatgggaagccattaaagatgatgtcgagttggggaactcagcttatcctatggttctggttcaaatcccaatgtataatgaaagagaggtttatcaactgtccattggagctgcatgtggcctctcatggccttctgatcggatcgttattcaagtccttgatgactcaactgacccaacaattaaggatatggtggaattagagtgtcaaagatgggcaagcaaagggatcaacatcaagtatgaaataagggacaataggaatggatacaaagcaggggctttaaaagaaggcatgaaacacagttatgtgaaacactgtgactatgttgtcattttcgatgctgatttccagcccgaacctgatttcctttggcgaaccattcctttcctcgttcacaaccctgaattagctttggttcaagctcgttggaaattcgtgaatgcagatgaatgtttgatgacaaggatgcaagaaatgtcattagattaccattttactgttgaacaagaagtggggtcttccacctattcgttctttggcttcaatggaactgctggtgtatggaggattagtgctttgaacgaagccggtggatggaaagatcgaaccacggtcgaggacatggatttagctgttcgagctagtctcaaaggatggaaattcctttaccttggtagcctaaaggtgaaaaatgaattgccgagtacattgaaagcgtatcggtaccaacagcatcgatggtcttgtggtccggctaaccttttcaggaaaatggtcatggagatcattaaaaacaagaaagtttcgacatggaagaaagtacatgtaatttacagcttctttgtggtcagaaagcttgttgcccacattgttacattcattttttactgtgttattttacctgcaactgtacttgtgcctgaagttgaggttccaaagtggggagctgtttatattccttctatcattaccattctcaatgctgtcggaactccgaggtcatttcacttactggttttttggatcctttttgaaaacgtcatgtcattgcatcgaactaaggctaccttcatcggcttattagaggctggtagagtaaacgaatggatcgtcactgagaaactcggggatgctcacaagtctaaagcagctgcaaaagcaccccgaaaaccccgtttccggttcgaagaaagactccatgtgttagagctaagcgtcggagcttatctattcttctgcggctgctacgacgtcgtgttcggtaaaaaccattacttcatatacctttttgcacaagcaatcgccttcttcatcatgggattcggatatgttggcaccatcgtccccaactcgtaatgcaactccttaaattagtccatagtggccattatcatcatcgccggtgtaattcttttggctactaatgccatcaacaggtgattatgtggtgattataacaacatttccttgcaatttttagtctttatgtaaaaaaaaacaaaatactaaaagggttaattactttaaggttgtagcataagaattttt

SEQ ID NO: 1662 - DNA, 2364 bp, Fagus grandifolia
ggtgtcgaggcttttagaagagctaacgcattcattatataagaacaaacatgagggagagaaatatgtgacacaaatagagtttacataaataaaaactctcttttctctgtctctaatttttctctattgctcatcattattttcttattctctgcttctgttttcatttgattacagaagcggaaaaaggttctgattttcctagttgtcttgtattgagtttgttgtttgtgtaatgtgtttaagagcttgatagattgagatctaaattgggtttgtttttgttctagttttttcttctgggtgtgtctgcaaagcaatatagtgtgggggtttgagcatttgactgacattccagctctgcctccattgcttttgcttgaccaagaagcaacaatcacaaacaacaaaaaaggaaaaataaaataaaatattcgtgctattttgcaaaggtggttctttataaccatgcagatctagtggggtttccttcagaaactctatacaataatcttttcagttcctagcttttgttctgttttttcttaaacaacaaagtaacaaagaaaaggccagggctttaaaatggaccggcttacatcaacgacacttcttcccgagtcgtttcaaggagccagagatgatatttccatgcaacttggaattatctgggctcagatcaaagcaccattgattgtccctctgttgagaatctctgtcgttttgtgtttgatcatgtcgttgatgctattcatcgagagggtttatatgggcattgtcattactcttgtaaagttgtttggtcgaaagccagataagcgttacaaatgggaggcaatgaaagacgacgttgagcttggaaactcagcttatcccatggtccttgttcaaatcccaatgtacaacgaaagagaggtgtaccagctatcaattggagctgcatgtgggctttcttggccttccgatcgtatcatcattcaaatactcgatgattccacagacccaacaatcaaggacttggtggagctagaatgccagagatgggcaagcaaaggcataaacataaagtacgaaataagggacaacagaaatgggtacaaagcaggggctctgaaagaaggcatgaagcgcagctacgtgaaacagtgcgattacgtagccatctttgacgcggattttcaacccgaaccagattttctctggcgcaccattcctttccttgtccataaccctcaaattgctctcgttcagacccgttggaaattcgtgaactccgatgaatgcttgatgacaagaatgcaagagatgtcattggattaccatttcactgtagagcaagaagtggggtcatccacctatgccttctttggattcaatgggacggcaggtgtgtggagaattgctgcacttaatgaggctggaggatggaaagatcggaccacggtggaagatatggacttggctgtcagagctagtctcaaaggctggaaatttttgtaccttggaagtctccaggtgaaaaatgaattgcctagtactttgaaagcctaccgctaccaacagcatcggtggtcatgtggtccagctaatcttttcaggaaaatggcaatggagattataagaaacaagaaagtaactttgtggaagaagatacatgtgatttacagcttcttcttcgttcggaagatcatagcccacataaacacatttgtcttctactgcattgtgctaccggcaacagtcatagtacctgaagttgcggttccaaagtggggagcagtttatattccatccctcatcacccttcttaatgctgttggaactccaaggtcattccacttactggttttctggatcctttttgagaatgtcatgtcactacatcgaacaaaggctaccatcattggtctactagaggctactcgagcaaatgaatggattgtaacagagaaactaggagatgctctcaaggctaaaggaggctctaaagcaccaagaaaacctcggttcaggattggagaaagactccttttgttagagcttggagttggagcttacctattcttttgtggctgctatgatgctttctttgggaaaaaccactacttcatattcctttatatccaagcaatcgccttcttcatcgtagggtttgggtacgttggctacttttgtaccaaactcttagaggaactccaacaatgatactgaagaagtcctttttgccattttgttcatgtgtctgtatgatttctgcttcagcaacatatacatggccattcatagcgacaatatcctgcaattctagcttagtaaaaaaaacaaaatatatatggtcattttttaatctaggttgcgcat

SEQ ID NO: 1663 - DNA, 1614 bp, Manihot esculenta
ccacaacccacaaaaatggatcgttttacgacaactgcaataattcctgatgcgtttcaaggtgctagagctgatatttccatgcagttttcaataatttgggatcagatcaaagcaccattgatcgtccctctgttaagactagcagttgccatttgcttgatcatgtcgttgatgctcttcatcgagaggctatacatgggcattgtcattatactagtgaagatttttggcagaaaaccagagagacgctacaaatgggagcccataagagatgatgttgagttgggcaactcagcttatccaatggttctgattcaaatcccaatgtacaatgaacgagaggtctatcagctttccattggagctgcatgtggactctcatggccatctgatcgtatcattattcaagttcttgacgattcaacagacccagtaatcaaggacttggtggagctagagtgtcaaagatgggcaagcaaagggataaatattaagtacgagattagagataatagaaatggttataaagctggagctttgaaagaaggcatgaaaagaaactacgtgaaaagctgcgactacgtagccattttcgacgcagattttcagcctgagcctgattttctatggcgaactattcctttccttttccataatcctgaattggctttggttcagtctcgttggaaattcgtgaattctgatgagtgcttgatgactagaatgcaagaaatgtctttggattaccatttcactgtggagcaagaagtgggttcctctacttatgccttctttggcttcaatgggacggcaggtgtatggagaattggtgcactcaacgaagctggaggctggaaggataggaccaccgtggaggacatggacctcgccgtccgtgctagtctcaaaggctggaaattcttgtaccttggtactcttaaggtgaaaaatgaactgcctagcacatttaaggcttaccgctatcagcagcatcggtggtcttgtggtcctgctaatctcttcaggaaaatgttgatggagattatcagaaataagaaggtgacattatggaagaaggtgcatgtgatatacagcttcttcttggtgagaaagatcgtagctcatatagtaacatttatattctactgcgtcgttttgcctgcaactgttttggtacctgaagttgaagttccaaagtggggagctgtatatattccttcaattattacaattctcaatgcagttggaactccaaggtcactacacctgatggtcttctggattctttttgagaatgttatgtcattgcacaggactaaggctaccttcattgggttgctagaagctggcagggttaatgaatggattgttactgagaaactaggagatgctctcaagaccaaagctgtcaaagcaccaaagaaacccagatttaaattcggagaaaggcttcacctgttagagcttggagctggagcttacttattcttctgcggctgctacgacgctgcttttgggaaaaatcactactttttatacctatatgtgcaagcaatagccttcttcatcatgggattcggatacgtgggcacatttgttcctcaatcttag

SEQ ID NO: 1664 - DNA, 2905 bp, Populus trichocarpa
ctataccctttacaatgagaagtgatgaaaagaatacagaggagggaagtgatttaaaaataaaaaacaaaaactgggaagagagagaaattcagggagaccctcttatataaacggcattattctgttccgttttttcatgctctcttcatttatttcttctctctgtttctagatttctattcgggttgtttctgcttcggtttcttgaagcagaaatacctttccattttgcaaattattatttttctttttctctcttcagagcaaaaaccacacacacgacaaatttgtcttttcattgttctctgcttcttccagcttcttctttcttttttttgatggattgacagctcaagagggtttcttcttctggttatcttttgtgggtgtctgtatagtagggttttttcaagcagtgactgacatcccagctctgtgtgtccgttgtttaattgttgcgtataccagaagcaaaaccacaaatccaaaaaaagaaatattctctcgcttttgtcaaaggaggtccttcgagatacattcagatctagctagctagtgggtttcctcaataaaaactgtttattctagcttcgcatttgttaatcatcctctgtttttgctctgtttttgtccccttgttaaatacataatcatatatagatcaagagtaggcaacaaatggagaggctaacctcaacacaaatgattcctgatgcatttcaaggtgctagagatgacgtaacaatgcaatttgctatgatttggggccagatcaaagcaccattgatagttcctctactaaggctcgcggttgccatttgtttgatcatgtctttgatgttgttcattgaaagggtttacatgggcatcgttatcgtgttagttaagctttttggtcggaaaccagataggcgatacaaatgggagccgatgaaagatgatgttgaggcggggaactcaacttatcccatggttctggttcaaatcccaatgtacaacgaacgagaggtttatcagctttcaattggagctgcatgtggtctctcttggccctcagaccgaatcataattcaagtcctcgatgattcaacagacccaacaatcaaggacatggtggagctggagtgtcagagatgggcgagcaaagggataaacataaagtatgagattagagatagcagaaatggttataaatcaggggcattgaaagaaggcatgaaacgaagctacgtgaagagttgcgattacgttgccatttttgacgcagatttccagcccgagcctgattttttacggcgcaccattccctttctagtccacaacccagaattgggtttggtccagactcgttggaaattcgtgaatgctgatgagtgcttgatgacaagaatgcaagaaatgtcactggattaccattttacagttgaacaggaagtgggctcctccacgtatgccttcttcggcttcaatggaacggcaggtgtatggagaattgctgcgcttaatgaagctggggggtggaaggacaggaccacggtggaggacatggacctagcagtccgagctagtctcaaaggctgggaattcctgtaccttagcagtgtaaaggtgaaaaatgaattgcccagtacattgaaagcatatcgctatcaacagcaccggtggtcttgtggtcctgctaaccttttcagaaaaatgtttatggaaattataacaaacaagaaagtgacatcgtggaagaaagtgcacgtaatctacagcttcttcttcgttaggaagatcgtagctcaccttgttacatttatcttttactgtgttgtgttgccggcaactgttttggtgcctgaagtcgaggtccctaagtggggagctgtttatatcccttccatcattaccattctaaatgcagttggaaccccaagatcgctccacttactggttttctggatcctctttgagaatgtcatgtcactgcatcgcactaaggctaccttcattggcctgctagaggctggtagagtgaatgagtggattgtcactgagaaactaggggatgctctcaagagtaaagctaacaaagccgccaagaaaccccgatttagatttggagaaaggctccatttattagagctcgggactggagcttacctcttcttctgcggttgctatgatgttgtctttgggaaaaaccactacttcatatacctttatgcgcaagcaatcgccttctttatcgtggggctcggctgtgtcggcaccattgttccccgctcttagtgtgttcttgagggctgggctaatattcttggccatctgcctgggctacttgttcaaagtgaattttcctgctatttagctttgtataaaaagacggaagaaggtcattcttttaggtttcaagcataaaaattaatcaatcgagtggatatgattccatccaaagatttagtttccttttcctgtgaatatccagaaatcaattacggaaattaaaacacataaatgttgttttacgtacgttggcataaggagcaaccgaaagtcggcttctggaaagtagatacaagtttctgttcattttttaacgggttgtaattgtgagattttgtagctctttcgtcctcctttttttttttcttgtgtaagtcgtcgttggcttcgagagggaataagctgatagaaatggtgtttcacagttgaattcttcgaatatgcttctcactctcgatatcaatacttgcttgcatagattagttgttcttctgttcatatattttctttttcctgccgtctggtcatacaaactgttggaaacaactaattacgtagggtagtgaagatttgccctaataaaaagtaaaggaaaaatagccaacgttgctaatgacgtttatctctgtta

SEQ ID NO: 1665 - DNA, 2353 bp, Aristolochia fimbriata
gaggcgtgagggagaacgggagcgaaaagattcgtgctttggtcccctttaaatccatgcagatctagcgaagctcctccgccatctcccatccgtgtcgattctccccttccgaggcttcttctcctcgttcgagtagaaaaagcgagagaaaagaagaaatggatcggatttcttcaggagcccttcttccggacacattccaggggagcagagacgacgttacagagcaaattgggctgatttggcagcagatcaaagcgccgcttatagtcccattgctgaggattgtcctcttcctctgtttggcaatgtctctgatgctcttcgtggagagagtctacatgggcgtcgtcatcgtcctcgtgaagctctttggccgcaaaccagagaagcgttacaaatgggagccgataagagacgatgtggagttgggtaattctgcttaccccatggtcctggttcaaatacccatgtacaatgaaaaagaggtttatcagctctccattggagctgcatgtggtctttcatggccgtcagacagaatcataatccaagtgctggacgattcaacggacccgactgtcaaggacttggtggagctggaatgccagagatgggcgagcaagggcatcaacatcaagtacgagatcagggacaatcggaacgggtacaaggccggggcgctcaaggaagggatgaagcacagctacgtgaagcaatgcgactacgtcgtcatcttcgacgccgatttccagcctgaacctgatttcctctggcgctccgtccccttcctcgtccacaaccccgaggtgggcctcgtccaggctcgctggaaattcgtgaactcgaacgagtgtttgatgactcggatgcaggagatgtccctggactaccatttcactgtggagcaggaagtcgggtcctccacttacgccttctttggcttcaatggaaccgccggagtctggcggatatctgctttaaacgaggccggaggatggaaggacaggacgacggtggaagacatggatttggcggtccgagctagtctcaaagggtggaagtttgtgtatctcggtgacctcaaggtcaagaatgaactccccagtactttcaaggcctaccgctaccagcaacatcgttggtcctgtggccctgctaaccttttcagaaaaatggtgaaggagatcataagaaataagagagtgtccctgttgaagaaggtttatgtgatctacagcttcttctttgtccgtaaggtcatagcccatattgtgacatttgttttctactgcgttgtgatgcctgcctctgttctggtgcctgaagttgatatcccaaagtggggagcagtttatatcccatccgtcattaccattcttaatgcagttggaacaccaaggtccatccatctactagtgttttggattcttttcgaaaatgtgatgtcattgcatcggacaaaggcgaccatgatcgggttgctagaagccggtagggtgaatgagtgggttgtgactgagaaattaggagatgcactcaaaacaaagcctgtcatgaaagcagcaaagaaaccacggatcaagatcggtgacaagcttcacctcctggagctcggtgttggtgcctggctgttcttctgtggatgctatgaccttgctttcggaaagaaccattacttcatatatctgtatcttcaggctattgccttcttcgttatgggtttcggctatgtgggcacctttgttccccactcttgaaggaacaaggaatggacatcggatgatcacaatgtttgtcttcacagcatgtctgtaattttcacttccctgtgatagaggtgcatggcttttagaaagcctcttagaatttgttatgttagagctcgtgataagccctgccattctttttcctaatgctggagagaagcagttctcaatctcatgccagtaagaattctagtgtgaatatcagaaagccagtatatatatatatatatttttttttttacataaatgggttacatacagagaggagagaagaagagcttgaagaaaaagaaggaagaatcagaatcagcaagaagtaaatgacattgggtccttagtcactgatgtaaacatctgtggatcagtggatggattgtaatcgtgggagttttgagttttgtagttttttttttttcctgagattttgtttgaaagcaaataagttgaatgggcaacccagaggttcaatttggatgattctcttttcttagggactctgctttttatctgttcccctctagcaaaatcatctgctacatggggagggaatatttgtacactgcaaatttttgcctctttct

SEQ ID NO: 1666 - DNA, 2701 bp, Cocos nucifera
tatttccttgctagttgcgaggcttcccttttaatttctcccctcgctctttaaattgctctgctgccagccttctctgctatatatataaatcgattgggggtggcagtaggtcgaagagaggaggttggcttcctttgttcccttcctctttctctctctacctgcattgttggtctctggttatttagggagtagatctttgatgggatgggtgtttaggtgagtgtgagcgagatctcaactccaactgggtcaattgggtgtttccttgagtgatccctccagtaacccgtctttttctttctctttctgctgctcctctgctcctcgccagtctttccttttcggaatcttctggggtttgggagggccgggagaaggcgtcgagacgaacgaccgacggtccagctccaccgcattgtcttgcgtagcttcccagcaacaaaacccctccttccagccacgaacaaacgaacaatcatcaaaagagaagagtcgaaaggatctcgttctctagagaaacgaaaggaaagcaggaagggcccttctcgcccatataaatccgtccagataagccccattattttcccgggcggccattagttccatccctcttcccttccatttctatactttctcttctttcgccttcgtcctcctcctcctccgccgccgccgcagttcccaaggagagggggtagagagatcatggagagggtatcgtcgacggcaatactcccggaggcgttccagggggctcgggacgacatcatggagcagatggggctggtgtggcagcagatcaaggctccggtcatcgtcccactgctccgcctcgcggtgtttctctgcctgaccatgtcgctgatgctgttcgtggagagggtctacatggccgtcgtcatcttcatcgtcaagctccttgggaagcgccccgaaaagcggtataaatgggagccaatgcgggacgatctcgagctcggcaactccgcctatcccatggtcctcgtacagattccaatgtacaacgaaaaagaggtgtatcagttgtccatcggagctgcatgcgggctatcatggccgtcggatcggatcataatccaagtgcttgatgattccaccgatcctgttattaaggatctggtggtgctggagtgccagcggtgggcgagcaaagggatcaacatcaagtacgagatccgggacaaccggaaaggttacaaggctggggcgctcaaggagggcatgaagcacggctacgtcaaggactgcgactacgtcgccatcttcgacgccgacttccagcccgagcccgacttcctctggcgcaccatccctttcctcgttcgcaaccccgaactagccctcgtccaggcccgctggaagttcgtgaattcggatgagtgcttgatgacaaggatgcaggagatgtccctggattaccacttcaccgtggagcaggaagtgggatcctcaacctatgctttctttggcttcaatggcactgccggggtgtggcggatatcagctatcaatgaagcaggaggttggaaagatcgaaccacagtagaagacatggacttagccgtccgagcaagccttaagggatggaagttcgtattccttggagatctcaaggttaaaaatgaattaccaagtactctgaaggcttaccgttatcagcagcacaggtggtcatgtggaccagcaaatttattcaggaaaatgttgctggagattgcaaggaacaagaaagtatctctcttcaagaaggtgcatgtgatctacaatttcttctttgtccggaagattgtagctcatattgtaacatttgtgttttactgtatggtaatccctgcaactgttttggtccctgaggtggagataccaacgtggggtgcagtttatatcccctcggtcattacccttctcaatgctgttggaactccaaggtctcttcacttgctcgtcttttggatccttttcgagaatgtcatgtctttgcacagaacaaaagcaacattcatcggcctgttggaagcagggagagtgaacgaatgggtggtcacggagaagttaggagatgctttgaaaacaaaagtggctgccaatgcagccaggaaaccacggatcaggataggtgacagattacatttgttggagcttggtgttggggcctatctcttcttctgtgggtgttatgatgtggcatttggaaagaaccattactttatattcctcttcctccaagcaattgctttcttcattgttggccttggttatgtcggcacatttgtcccgcattcctaatggatcttgattggacatattaccaaagccttcaatatccatggttctgccatcttgtctttctcaggtcgggcatagaagtataagcaacctcacttgatgtttgtcgtcatggaacaaactcatgtacagaaagctccataaatctccactgatgcaaagcattctcgcatggaatttgcatctgggtattctatcatagaagtacacatgtcgtctgcggatatctgtttgatacaaaggagatcatggacgatcaacaggtaggaagtttgggtctccttcacagaagcagcagcagtagagaaacaagactttaatctgaaggtgataatgtgtaaagaagcacatctagattgattatgattgttggatttttcaaaatctt

SEQ ID NO: 1667 - DNA, 2918 bp, Eucalyptus grandis
gctcgaatcacgcttctgaaattatgattgaaacttgaaaagaactagtttctgcgaaccacgcaaattgggaaaagcagattttgtaatgtagaaagctccggagggatttaacctaacagtgccttctcattcccgtctgatggttgttgagagcgtcacttcgtatatatatcaagcctcctcactctgttttgtgctgcagtagggagagagagagagagagagagagagagagagagagagctttcgtcttcgttctcatttcctctctcctccccccttgttcattcgtttctcgtttctgcttccgtcttcgtttgagggcagcggcagagaaaaagcttccatttttctttgatagagttcgtccgtccgtcttcatcgataagtaattgtcttattttgctcagctgttggattcgtgatcaggcccttcttttccatgtcgtttttttcagtgggtctctctgcaatgcatcaagaggagtgacctttgagcgagcgattcactgacatttccagctctgccttcctttttttcccacttctgctttgcttgacccagaagcaatattgcaaagcaaatattctctctccaactctctgcttttttcagataattcaattgccagatcacagagatctacttgctctcatcagctctggtccctagcatcacattctccctctctcgcattgctctgtttcgcgatcgaaaaacagagcaaacgagtctctgccgaaatggaccggctctctgcaactggtctccttcccgacacgttcggaggagcaagagacgacatctccatgcaactttcgctgatttgggctcagatcaaggcgccgttgctcgtcccgttgctccggctcgcggtgttcctttgcctggccatgtcgctgatgctgttcctcgagagggtgtacatggccgtcgtgatcctcctggtgaagctcttcggccggaagccggagaagcggtacaggtgggagcccatgaaggacgacgtcgagctgggcaactcggcctaccccatggtcctggttcaaatcccaatgtacaacgagcgagaggtttatcagctctcgatcggagccgcatgcggtctctcgtggccgtccgaccgcatcatcattcaagtcctcgacgattccaccgacccgacgatcaaggacctggtggagctggagtgccagaggtgggcgagcaaagggatcaacatcaggtacgagatccgggacaaccggaacgggtacaaggccggggcgctcaaggagggcatgaagcggagctacgtgaagcagtgcgactacgtcgccatcctcgacgccgacttccagcccgaacccgacttcctctggcggaccatccctttcctcgtccacaaccccgaggtcgccctcgtccaggcccgttggaaattcgtgaatgcggacgagtgcttgatgacgagaatgcaagagatgtccctggattaccatttcaccgtcgagcaagaagtcgggtcctccacccacgcctttttcggattcaacggcacggcgggtgtatggcgcatttctgccctgaacgaggccggaggttggaaggaccggaccaccgtggaagacatggacttagcagtcagggcgagcctcaaaggctggaagttcgtgtacctcgggagtctcaaggtgaaaaatgagctgccaagtaccttcaaggcttaccgctttcagcaacaccgttggtcgtgcggtcccgcgaatcttttcaggaagatggccatggaaatcattcgaaacaagaaggtcactctgtggaaaaaggtgcatgtgatttacagcttctttctggttagaaagatcgtagcgcacatcgtcaccttcatcttctactgcgtcgtgttgccggcgaccgtttttgtgcctgaagtcaccgttcccaagtggggtgcagtttatattccttccattattactgtcctcaatgccgtcggtactcctaggtcgctccatttggtggttttctggatcctgttcgagaatgtcatgtcgttccaccgaacaaaagcaaccttcatcgggcttttagaagccgggagggtaaacgagtggatcgtcactgagaaactcggggatgcgctcaaggttaaagcttctaacaaagtgcccaaaaagcctaaattcagattcggagataggttgcatgtgctagagctcggcgtcggagcctacctcttcttttgcggctgttacgacatcgccttcgggagaaatcactacttcatgtaccttttcgcgcaagccatcgccttcttcattatgggatttgggtacatcggcaccttcgttcctaattcatagaacaaatcagggtgcagaagccgcgaatctgccccccacccccacattctatcatcagaacctcataaaccaataaaacaaaaacatggtttgccacacaccatttccctgcaattccagctttccataaaggtacacaaaaatattacattcttccagtccaagaaggctagctgtcctctttgtaaatacaaacaagggttagaaacaagatcagaaaggggaaaaccataagaaagaaaagttgtaaaggagagtttgttttgctgtgagaacattacacggcctcagagaagatgaggaagggaaggctgcttagcggtttgacttcggcgcgtattcaaatagagggaaaaaaagaaaaaaaataaaaaaataaacacgtttgagtgaaatttgtttgttgtgaggagcatttgtatatttgtgccctcttttgtttctcttcttccttgttttgttctgcacttctcttgtattacgttgggattgagcttctttggaagcaaataagtttgatgtcaagtggataaattcacatttgcaacctctctctctctctctctctc

SEQ ID NO: 1668 - DNA, 1928 bp, Medicago truncatula
gagagaatacagagagaaaaaaacagagcattcttatttctcacaatcacagtgccatagctcttacagaaactgaaacccgcaagcactctctctctctcctttcaattttccaaccatttacctgctttgcattgtcattgttctgttctgtctctcttttctttttcattaaggaaccataacatgcttagatcttcaagcatatcaacgttttgttaatttttctacctctttcacagtttcttttctgcatgaccctggaaacaaaaacaagtttttctccttttctttaagtaaagttggttaaatttattcaaaaaaacatttgaagtaaaaaaatgtatgcttttcaaggagcaaggaatggacttggtttacaacacgagtttctttggagacaaatcagagagccattgatcgtgccattgctgagagttgcagtgtttgtttgcctaggcatgtcgttgatgatgttggttgagagagtttacatgggaattgtgatttcttatgtgaagttgtttggtagaaaaccagagaaacgttataaatgggagactattaaggatgatgttgagttgggaaactctaattaccctatggttcttgttcaagttccaatgtataatgaaagagaggtttatcagttatcaattggtgctgcatgtggactctcatggccttctgataggatcatcatacaaattcttgatgattcaactgatcctacaattaaggagttggtacaagtagaatgccgtagatggagaagcaaaggtgtgaatataaagtatgaagttagggacaatagaaatggttacaaagcaggtgcattaaaggagggaatgaaacatagctatgtgaaacaatgtgattatgttgctatctttgatgctgattttcaaccagaacctgattttctttggcgaaccatccctttccttgttaataatcctgatattggtcttgttcaggctcgctggaagtttgtgaatgcggatgaatgtttaatgacaaggatgcaagagatgtcactcaattatcattttacagttgaacaagaagttggatcttcctcttacgccttctttggcttcaacgggactgcgggtgtatggagaatttcggcgttgaatgaagctggtgggtggaaagatagaaccaccgtcgaagacatggatttggctgtacgtgccagtctcaaaggatggaaattcttatacctctccgatttgcaggttaaaaacgaattgccaagtacattaaaagcctttaggtaccaacaacatcgatggtcatgtggaccagccaatcttttcagaaaaatggtaatggagattgtcacaaacaagaaagtgtctttgtggaagaagatatatgttgtttacagttttttctttgttcggaagattgtggcccacatcaacacatttgttttctattgcattgtgttacctgcaactgttatggtacctgaggttgtggtccctaaatggggagctgtttatatcccttccatcatcacccttttaaatgctgttggaactccaaggtcattccatttacttgtcttttggattttattcgagaataccatgtctcttcatcgaacaaaggcaacgattattggtctactagaggctagtagagtgaatgaatggattgtcactgaaaaacttggagatgctttcaagggtaaagctagtggtaaaggactcaaaaagcttcgatttaggattggagacaggattcacatgttagaacttgttgttggattctacctcctcttatgtggctgctatgatcttatgtatgggaaaaatcacttcttcatattcctatacatccaagcgtttgctttcttcatcatggcatttggatatgttggcacttttgttcccaactcctagaagaacttggcattg

SEQ ID NO: 1669 - DNA, 2016 bp, Vaccinium corymbosum
acacattcacatttttacagaagcaaaggactttcataattcacacactttggtctccctgcaaaaacatcacagggcattttgtgtgagattttttcgcacataaacctttacattcttaggctttatctttgcaaaatcctctgctttgttgcttcacccagaagcaaaatctcgcaaaggaattattcttctctctttttccctaaagaaagcatatacatacacaaacagatcttgttgggtttcgttaaaagcctctgttttgctctgtttttcgttgagtttctctgttaaattacacgaaaatggaacgtctttcatcgacgacgctgattcccgacgctttctcgggcgctagggacgacattacccagcaaattatgctgatttgggaccagatcaaagctccattgattgtccctctcctgaaactagctgttttcttgtgtttgataatgtccctaatgctgttcattgagaggtctacatggccgttgtgatcacccttgtgaagttcttcggacgaaaaccagagaaaaggtacaatggagccattgaaggacgatcttgagttcggcaattcagcttacctatggttcttgttcaaattccaatgtacaacgaaaaagaggtgtatcagctatcaattggagctgcatgtgggctttcttggccttctgatagaatcataattcaagtactggacgattcaaccgaccctattatcaaggatatggtggaaatggaatgccagagatgggcaagcaaagggataaatataaagtacgaaatcagagacaatcgaaacgggtcaaagcaggggctctgaaagaaggcatgaagcgagattatgtgaagcattgcgattacgtcgccattttcgacgcagatttccaaccgacccgatttcctctggcggactatccctttcctcgcccagaacccccgaactcgccctcgttcaggcccttggaagttcgtgaacgcaaacgaatgtttgatgacaagaatgacaagagatgtcactggactaccatttcacagtggagcaagaagtgggctcatccacttatgccttctttggtttcaatggggctgccggtgtgtggagaattgccgcgattaatgaggctggagggtggaaggaccgcacaacagttgaagatatggatctagctgtccgagccagtttgaaaggctggaaattcctttaccttggttctttgaaggtgaaaaacgaattgccaagtacattcaaggcctactgttaccaacagcaccgttggtcttgtggccctgccaatcttttcaggaaaatggtaatggagattgtaacaaacaagagagtaacgacgtggaagaaggtgcatgtaatctacagtttctttttcgttaggaagattgtcgcccacattgtcacgtttgtgttctactgcattgtactaccggcaactgtgctggtaccggaggttgaggttccaaagtgggcagctgtttatatcccttctgtcattaccattctcaatgcaattggaactccaaggtcactccacttattggtcttctggatcctatttgagaatgtcatgtcactgcaccggaccaaggccaccttcatcggtcttctggaagctgggagagttaacgaatgggtagtcaccgagaaacttggagatgccctaaagacaaaagcaggagctaaagctccgaaaagacctcgcttcaagattggagaaagaattcatttgttggaatttggcacgggcctctacctcttcttctgtggatgctacgacattgcctttggtaaaaaccactacttcatctacctttttgtccaagccaccgccttcttcatcatgggattcggttacataggcacctttgtgcccaactcatagcgcgcaggtttaaaaaagttgattgtcagcttcatagttggtttcttcattcatcgcaccgtgtgtttatcataattcggcatcacatgtcagtgccgtctttagcaatttt

SEQ ID NO: 1670 - DNA, 2112 bp, Cocos nucifera
gcccatataaatccgtccagatcagccccattattttccccggcggccattcccaatctcttctttccccttcctcctcttcctcctccggagagagatcatggagacggtatcgtcgacggcgctgctcccggaggcgttccagggggctcgggacgacatcatggagcagatggggctggtgtggcagcagatcaaggctccggtcatcgtcccactgctccgcctcgcggtgtttctctgcctgaccatgtcgctgatgctgttcgtggagagggtctacatggccgtcgtcatcttcatcgtcaagctccttgggaagcgccccgaaaagcggtataaatgggagccaatgcgggacgatctcgagctcggcaactccgcctatcccatggtcctcgtacagatcccaatgtacaacgaaaaagaggtgtatcagttgtccatcggagctgcatgcgggctatcatggccgtcggatcggatcataatccaagtgcttgatgattccaccgatcctgttattaaggatctggtggtgctggagtgccagcggtgggcgagcaaagggatcaacatcaagtacgagatccgggacaaccggaaaggttacaaggctggggcgctcaaggagggcatgaagcacggctacgtcaaggactgcgactacgtcgccatcttcgacgccgacttccagccggagcccgacttccttttccgcaccatccctttcctcgtccataaccccgagcttgccctcgtccaggcccgctggaagttcgtgaattcggatgagtgcttgatgacaaggatgcaggagatgtccctggattaccacttcaccgtggagcaggaagtgggatcctcaacctatgctttctttggcttcaatggcactgccggggtgtggcggatatcagctatcaatgaagcaggaggttggaaagatcgaaccacagtagaagacatggacttagccgtccgagcaagccttaagggatggaagttcgtattccttggagatctcaaggttaaaaatgaattaccaagtactctgaaggcttaccgttatcagcagcacaggtggtcatgtggaccagcaaatttattcaggaaaatgttgctggagattgcaaggaacaagaaagtatctctcttcaagaaggtgcatgtgatctacaatttcttctttgtccggaagattgtagctcatattgtaacatttgtgttttactgtatggtaatccctgcaactgttttggtccctgaggtggagataccaacgtggggtgcagtttatatcccctcggtcattacccttctcaatgctgttggaactccaaggtctcttcacttgctcgtcttttggatccttttcgagaatgtcatgtctttgcacagaacaaaagcaacattcatcggcctgttggaagcagggagagtgaacgaatgggtggtcacggagaagttaggagatgctttgaaaacaaaagtggctgccaatgcagccaggaaaccacggatcaggataggtgacagattacatttgttggagcttggtgttggggcctatctcttcttctgtgggtgttatgatgtggcatttggaaagaaccattactttatattcctcttcctccaagcaattgctttcttcattgttggccttggttatgtcggcacatttgtcccgcattcctaatggatcttgattggacatattaccaaagccttcaatatccatggttctgccatcttgtctttctcaggtcgggcatagaagtataagcaacctcacttgatgtttgtcgtcatggaacaaactcatgtacagaaagctccataaatctccactgatgcaaagcattctcgcatggaatttgcatctgggtattctatcatagaagtacacatgtcgtctgcggatatctgtttgatacaaaggagatcatggacgatcaacaggtaggaagtttgggtctccttcacagaagcagcagcagtagagaaacaagactttaatctgaaggtgataatgtgtaaagaagcacatctagattgattatgattgttggatttttcaaaatcttttctccttttctttgcaagtgt

SEQ ID NO: 1671 - DNA, 1882 bp, Nicotiana benthamiana
caagccattaatgcaatcatctgcttctgctatcccattgattgcagaagctgaaagcatcattttatttgtcccatttgttttcttaacactaaaaaagaaacaacttgtctcctcattttgatttattttcattacagtaaggtctatgttttgtctctgacattccaccattctcttgcttgaaacagaagcaaaaaatctcagaacaagaaaatattctttcacttttctgccttacttaaaagagcttactttcttaaaacaaattccattgttttactctgttttctaaaatggatcgtttttcatctacaactttgcttcctgatgatttaactgtacaactaacgataatttgggaacagatcaaagccccattgattgttcctttactcagaattgcagtatttttgtgccttttaatgtcacttatgttgtttattgagagagtatatatggggattgttattattcttgtgaagttttttggtaaaaaaccagaaaaacgttacaaatgggaatctttaaaagatgatgttgagcttggaaattcatcttatcctatggtccttgttcaaatcccaatgtataatgaaaaagaggtttatcagctttcaattggagctgcatgtggcctttcatggccttctgatcgtattatagtccaagttcttgatgattcaactgatcccattatcaggaatttggtgtcaatggagtgccagagatgggcaagcaaagggataaatataaagtatgaaattagagacaacagaaatggttacaaagcaggggctttgaaggaaggattgaaacatcaatatgtgaagcagtgtgattatgttgctatatttgatgctgattttcaacctgagcctgatttcctttggcgtaccattccatttctagtttacaatcctgaacttggccttgttcaagctcgttggaaatatgtgaatgctgatgaatgtttgatgacaagaatgcaagaaatgtccctggattaccatttcacagtggagcaagaagtgggttcttccacctatgcttttttcggctttaatgggacagcaggtgtttggagaattgctgcaattgacgaggctggaggttggaaggacaggacaacagttgaggatatggatctggctgtccgtgctagtctcaagggctggaaattcttgtacctttcttctctcaaggtgaaaaatgaattaccaagtacattcaaggcctatcgctatcaacaacatcgttggtcttgtggccctgccaatcttttcaggaagatgtttgcggagatcataagaaataggaaagtgtctttatggaagaagatccatgtgatttacagcttcttctttgtaaggaaggtcgtcgcccacattgtcacctttgtattctactgtattgtattgcctgccactgtattagtacctgaagttgaggttccgaaatggggagctgtttacattccttcgattattacactactcaatgctgttggaactccaaggtcattccatctgataatattttggatccttttcgagaatgtcatgtcattacatcggactaaggctacgttcattggcttgttagaggcaggacgagtgaatgaatggatcgtcacggagaaactaggggatgctttcaagattaaatcagccgtcaaagcgtttaagaaacctcgatttaggtttggtgacagacttcatttgttagagcttgccactggcgcgtacctcttcttttgtggatgctatgacattgcctttgggaagaatcactatttcctgtacctctttattcaagcatttgccttcttcatcatgggatttggtcatgttggtacttttgttcccaactcttagccatt

SEQ ID NO: 1672 - DNA, 2404 bp, Solanum lycopersicum
attccacattctgctctgcttcttctttttctctctagtttcttctttcaccgcttattctccattcatactatctactcatatctgcttctgctttcgcattgattgcagaagcagaaatcatcatttcttaccccattttaaattccacaaaattaaaaaaaagaaaaaaatctgttctcatttgattatgagttcaatttaatctttttttttgtgtttctgacattccaccattgttttgcttcatctagacacaaaaaatcccagaaaaaacacattattttcactttttgctttagttaaaaccctcccctgtttttgttctgttttactctgtttttttttagttttaaagaagctcttttctcccctgtttctgctctgttttactaaaatggatcggttttcgtcgacgactctgtttcctgatacactagccggtacaagagatgatttaacagagcaatggacaataatttgggaacagattaaagctccgttaattgttccacttcttagaatcgcggtgtttttgtgtctgttaatgtcgattttgctcttcattgagagagtgtatatggggattgtgattacgctagtgaaaatgtttggtcgaaaaccagataaacgttataaatgggaatctttaaaagatgatgttgagattggaaattcatgttatcccatggttcttgttcaaattccaatgtataatgaaaaagaggtttatcagctttcaattggtgctgcatgtggactttcatggccttctgatcgtattataattcaagttcttgatgattcaactgatcctattatcaagaatttggtgtcaatggagtgccaaagatgggcaagcaaaggaatagatataaaatatgaaataagagacaacagaaatgggtacaaagcaggagcattgaaggaaggattgaaacatccatatgtgaaacaatgtgattatgttgctatatttgatgctgattttcaacctgaacctgattttctctggcgcaccattccatttttagtacacaatcctcaactcggacttgttcaagctcgttggaaattcgtgaatgctgatgaatgcttgatgacaaggatgcaagaaatgtccctggattatcatttcacagtggagcaagaagtgggctcttccacctatgctttttttggctttaatgggacagccggtgtttggagaatcgccgcattagaggaggctggaggttggaaggataggacaacagtcgaggatatggacctggccgtccgcgctagtctcaagggctggaaattcttgtacctttctgctctcaaggtgaaaaatgaattaccaagtacattcaaggcgtatcgctatcaacaacatcgttggtcctgtggcccggccaatcttttcaggaaaatgtttatggagatcataagaaacaagaaagtatcgttgtggaagaagattcatgtgatttacagcttcttctttgtaaggaaagttgtagctcacattgtgacatttgtgttctactgtgtcgtactacctgcaactgtattagtacctgaggttgaggttccgaaatggggagccgtttacattccttccattattacaatactcaacgcagttggaactccacggtcgttacatctgataatattttggatccttttcgagaatgtcatgtcactacatcgaacaaaggctacgttcattggattgttagaggcaggaagagtcaacgaatggattgtcaccgagaaactaggggatgttctcaagatgaaatcagccatcaaagcagttaaaaaacctcgatttaggtttggtgacagactacttttgttagagctagccactggtgcttacctcttcttttgtggatgttatgacgtcgcctttgggaaaaatcactatttcttgtacctcttccttcaagcattcgccttcttcatcatcggatttggtcatattggtacttttgttcccaactcttaaggatactactcgtggaagcaacgctgaagcagcaatgttttcagcttcctttttttcacacgtaaagagaaatcgagttgttcattctttttggttctagcataaagtattcgagttgatgactcgaatctgttttgttctctgtgtatattccaatgaatatgtttgaaggttaaacagtacaacaaagaaaattgtattgtaaaaatatgtatacagaagacaggtaaaaaaaatgaaggataatatcttgtgcttattatacaccaagtaacagctaaattttgctgcttatttttttgtttgtttctttgtattctcagttttctttttatgttatatagaaattgaagtgaacttgataattgatcttgtgaaaaataatggaagggatactcttctttt

SEQ ID NO: 1673 - DNA, 1893 bp, Tripterygium wilfordii
aaaaacaaaagggaaatattctattctctctgttttttgtcaatcaacctcctttaaatcgacgtagatctagtgggttttgtacaatactagtacacaacatctcatttgtgtctcctttgttttcttgctctgtttctgttttcttgctctgtttctgtcacatttgaagaagaacccacaaaatggagaggctatcttcaacaaatcttcttcccgaaacatttcagggagccagagacgacttatcaatgcaattatcaatcatttggggtcagatcaaagccccattgattgtgcctctcctgagggttgcagtcgcaatatgtctcgcaatgtctttgatgctcttcgttgagagagtttatatgggcatagtcattgttttgatcaagatttttggtcgaaaaccagagaagaaatacaagtgggagcccataaaagatgacattgagattggtaactctgcttacccgatggttctggttcaaattccaatgtacaatgaacgagaggtttatcagctttcaattggagcggcatgtggtctgtcctggccttccgacagaatcataattcaagtccttgatgattcaacagacccaactatcaaggatctggtggagctggagtgtcaaagatgggcaagcaaaggaattaacataaagtacgaagtgagagataacaggaatggctacaaagcaggggctttgaaggaagggatgaagcggagctacgttaaaaactgcgattttgttgccattcttgacgcagattttcagcctgagcctgattttctgtggcgcaccattcctttccttgttcacaaccctcaattgggtctggttcaggctcgctggaaattcgtgaattcggatgagtgcttgatgacaagaatgcaagagatgtcacttgattaccattttactgtggaacaagaagtagggtcctccacacatgccttcttcggcttcaatgggacagcaggtgtatggagaatatctgcacttaatgaggctggaggatggaaggaccggaccactgtggaggatatggatcttgcggtccgagccagtctcaaaggatggaaatttctctaccttggcgctctcaaggtgaaaaatgagctgccaagtacattcaaggcataccgatatcagcagcacagatggtcttgtggtcctgctaatctcttcagaaaaatggttatggagattatactaaacaagaaagtgacattgtggaagaagattcatgttatttacagcttcttcttggttaggaagatcatagcccacctggtcacattcttcttctactgcatcgtgttaccggcgactgttttagttccagaagtagaggttccaaagtggggatctgtttacattccttccatcattaccattctcaatgcagttggtactccaaggtcattgcatcttatggttttctggatcctttttgagaatgtaatgtctctgcaccggagtaaggcaactctggttggcttgctagaggctgctagagtgaatgaatggattgtcactgaaaagctaggagatgctctcaagtccaaggcagccacaaaagcacccaagaaacctcgcttcaggtttggagaaaggctgcatatgttggagcttggagttggagcttacctcttttttatcggctgctatgatgttgtcttcgggaaaaaccattattacttttatctttatgttcaagcctttgccttcttcatcatggggttcggatatgttggcaccttcgtccccaactctcactaatgccgggcgggtttgtgctcttcagcagcataagcttgtgtaaagagaccgaaaaaagggtgtaattcttttaggtcaatcgtaagaattcgagtgagatttt

SEQ ID NO: 1674 - DNA, 2214 bp, Cicer arietinum
cattatcacactcacaatgccatagcttttacaaaaactcaaacacacaatctctctctctctttccccttttattaattccgttcgttttttcaaccctttatctgctttgcactctcattgctctgttctgaatctctttaaaccagaacaggttttaaccttcagataaaatcagaatattatgtgttctataatcatggaaaaagcggcatatatccattagcattatcaacaatactcttccattaactactttctgtttctagatatcaaataaaaaaactttgtcctatgttttgagttgaaacatagcaaggttttgtttttttccttctttgctagaccattgaaacaaaaaggaaactattctcttttctttaaccaaattttgttaatttattcaaatccattccatttcaaccaactgggccattgtcattatcattttttaacaaaaaaaaaaaattcttaagtaaaaaatggttgaatttcaaggagcaagtgatgaagttagtttacaacttgagtttatttggagacaagttagagaaccattgatcgtgccaatactgagagtggcagtgtttctatgtttgaccatgtcgttgatgatgttggttgagagggtttacatgggcattgttatttgtttggtcaagttgtttgatagaaaaccagaaaagcaatataaatgggagagttttaaggatgatgttgagttgggaaactctaattatccaatggttcttgttcaagttccaatgtacaatgaaagagaggtttatcagctatcaattggtgctgcatgtggactctcttggccttctgataggatcatcatacaaattcttgatgattcaactgacccaacaatcaaggagttggtggagctagaatgccataaatggagaagcaaaggtgtgaacataaagtatgaagttagggacaacagaaatgggtataaagcaggtgctctaaaagaaggaatgaagcatagctatgtgaaacaatgtgattatgttgccatctttgatgctgattttcaaccagaacctgattttctttggcgaaccattcctttctttgttaataatcctgaaattggtcttgttcaggctcgctggaagtttgtgaatgcggacgaatgtttgatgacaaggatgcaagaaatgtcacttgattaccattttagagtggaacaagaagtggggtcttccacctacgctttttttggcttcaatgggactgctggtgtatggagaactttggctttgaatgaagcaggtgggtggaaagataggaccacagtggaagacatggaccttgctgtacgtgccagtctcaaaggatggaaattcttatacctctccaatttaaaggttaaaaatgaattgccaagtactttaaaggcctatagataccaacaacatcgatggtcatgtgggccggccaatcttttcagaaaaatgtttagggagattgtgacaaacaagaaagtatctttttggaagaagatatatgttgtttacagttttttctttgttcgaaagattgtggcccacatcaacacatttgtgttctattgcattgtgttacctgcaacagttgttgtgcctgaggttgtggtccctaagtggggtgctgtttatatcccttccatcatcacacttctaaatgctgttggaactccaaggtcacttcatttacttctcttttggattttgtttgagaatactatgtctctacatcgaaccaaggcaacaattattggtcttttagaggctagtagggtgaatgaatgggttgttactgaaaaacttggtgatgctcttaagggtaaagttggtggaaaaggacttaaaacatttcgattcaggattgtagataggattcacatgttagaacttcttgttggattctacctcctcttctgtggttgttatgatcttatgtatgggaaaaatcacttcttcatatttttatacatccaagcacttgctttcttcatcatggcatttggatatgttggcacttttattccgaactcataaaagaactatatcattcactaatttcgatttttggtacttcaactttgtttatatctataaatatattgtaatatatattgttaataatacattatattattaacaatcacatgtatctacaaatatattgtaatattataatatattcattatttacaat

SEQ ID NO: 1675 - DNA, 2639 bp, Cocos nucifera
ggggtggcagcaggagaagagaggaggttggcttcctttgttcccttcctctttctctctctacctgcattgttggtctctggttatttagggagtagatctttgatgggatgggtgtttaggtgagtgtgagcgagatctcaactccaactgggtcaattgggtgtttccttgagtgatccctccagtaacccgtctttttctttctctttctgctgctcctctgctcctcgccagtctttccttttcggaatcttctggggtttgggagggccgggagaaggcgtcgagacgaacgaccgacggtccagctccaccgcattgtcttgcgtagcttcccagcaacaaaacccctccttccagccacgaacaaacgaacaatcatcaaaagagaagagtcgaaaggatctcgttctctagagaaacgaaaggaaagcaggaagggcccttctcgcccatataaatccgtccagataagccccattattttcccgggcggccattagttccatccctcttcccttccatttctatactttctcttctttcgccttcgtcctcctcctcctccgccgccgccgcagttcccaaggagagggggtagagagatcatggagagggtatcgtcgacggcaatactcccggaggcgttccagggggctcgggacgacattacagagcagatggggctggtgtggcagcagatcaaagcgccggtcatcgtccccttgctccgcctcacggtgttcctctgcctggccatgtcggtgatgctgttcgtggagaaagtgtacatggccgtcgtcatcgtcatcgtcaagctattagggaagccgccggagaagcgctacaaatgggagcccatgcgggacgacctggagctcggcaactctgcctatcccatggtcctcctccagatccccatgtacaacgaaaaagaggtgtatcagttgtccatcggagctgcatgcgggctatcatggccgtcggatcggatcgtaatccaagtgcttgatgattccaccgaccctgttattaaggatctggtggagctggagtgccagcggtgggcgagcaaagggatcaacatcaagtacgagatccgggacaaccggaacgggtacaaggccggggcgctcaaggagggcatgaagcacagctacgtcaaggactgtgactacgtcgccatcttcgacgccgacttccagccggagcccgacttccttttccgcaccatccctttcctcgtccataaccccgagcttgccctcgtccaggcccgctggaagttcgtcaattcggatgaatgcttgatgacaaggatgcaggagatgtccctggattaccacttcaccgtggagcaggaagtgggatcctcaacccatgccttttttggcttcaatggtacagctggggtgtggcggatatcagctcttagagaagcaggaggttggaaggatcggaccacagtagaagacatggatttagctgttcgagcaagccttaagggttggaagtttgtattccttggagacctcaaggttaaaagtgaactaccgagtgctctcaaggcttaccgttatcagcaacacaggtggtcttgtggaccagcaaatctgttcagaaaaatgtttttggagattgcaaggaacaagaaagtatctctcttcaagaaagtgcatgtgatctacaatttcttctttgtgcggaagattgtagcccatatcgtaacctttgtgttctactgtctggtaatccctgcaactgttttggtccctgaggtggagataccaacgtggggtgcagtttatatcccctcggtcattacccttctcaatgctgttggaactccaaggtctcttcacttgctcgtcttttggatccttttcgagaatgtcatgtctttgcacagaacaaaagcaacattcatcggcctgttggaagcagggagagtgaacgaatgggtggtcacggagaagttaggagatgctttgaaaacaaaagtggctgccaatgcagccaggaaaccacggatcaggataggtgacagattacatttgttggagcttggtgttggggcctatctcttcttctgtgggtgttatgatgtggcatttggaaagaaccattactttatattcctcttcctccaagcaattgctttcttcattgttggccttggttatgtcggcacatttgtcccgcattcctaatggatcttgattggacatattaccaaagccttcaatatccatggttctgccatcttgtctttctcaggtcgggcatagaagtataagcaacctcacttgatgtttgtcgtcatggaacaaactcatgtacagaaagctccataaatctccactgatgcaaagcattctcgcatggaatttgcatctgggtattctatcatagaagtacacatgtcgtctgcggatatctgtttgatacaaaggagatcatggacgatcaacaggtaggaagtttgggtctccttcacagaagcagcagcagtagagaaacaagactttaatctgaaggtgataatgtgtaaagaagcacatctagattgattatgattgttggatttttcaaaatcttttctccttttctttgcaagtgtacgattgtgaaggaaa

SEQ ID NO: 1676 - DNA, 2560 bp, Vitis vinifera
aagaaagcttatataagatactctctctcttcatctcggcacagctttcttcttccgcctccctcctctggtgctacatttatttgtgttgctctctacttctgttttctcttattagaggagcagaagctctggttcgtggagattgttggagagagagggaagagaaagctgggctttttatgcggcttgcctttaaggcttgcttgtacgagtttagaggattgagattcgaacggagtttgttctagtcatctcttgtgtggctgagccaggcgactgacattccaactccaccaccattgttttgcgtatatcggaagcaaaaccaccagaaaagaagaaatattcgtgctcttttcgcaaaggaacttctttaaattcatgcagatctagtgggtttctttaacgaactgtgccgttcagtcatctgatactcttgttcctagcttcctactcgcttctcctctgtatttgcttttttcagagcaaaagacagaaatggatcggctttcgtcgacaactcttcttcctgatgaacttcagggaacgagagacgacatttctgagcaacttggggtagtttggagtcagatcaaagcgccagtgatcgtacctctcatgagcattgcggtggccgtgtgcttggcgatgtcactgatgctcttcttcgagagggtctacttgagcattgtcatcgttcttgtaaagctctttgggcgaaaaccagacaagcgttacaaatgggagcccatgaaagacgatgtagagttgggaaactcggcttacccgatggttctggttcaaatcccaatgtacaacgaaaaggaggtttaccagctctcaattggagctgcatgtggactctcatggccctccgatcgtatcataattcaagtcctggacgattcaaccgaccccacaatcaaggacttggtggagctagaatgtcagagatgggcaagcaaaggcataaacatcaagtacgagataagaaacaacagaaatgggtacaaagcaggagctctcaaggagggaatgaaacacagctacgttaaggagtgcgattacgtagccatcttcgacgccgatttccaacccgaacctgattttctgtggcgcaccgttccctttctcgtccacaaccctgaaatagctctcgttcaggctcgttggaaattcgtgaactcggacgagtgtttgatgactaggatgcaagagatgtcattggattaccatttcaccgtggagcaggaagtgggctcctccacctatgccttctttggattcaatgggacagcgggtgtatggagaattgctgcactgaacgaagctgggggatggaaggataggacaacagtggaggatatggatctggcagtgagggctagtctcaaaggctggaaatttgtctaccttggtactctcaaggttaaaaatgagttgcctagtacctttaaagcctaccgctaccaacagcatcggtggtcgtgtggccctgctaatcttttcaggaaaatggtaatggagattgtaagaaacaagaaagtgtctctgtggaagaaggtccatgtgatttacagcttcttcatagttaggaagcttgtagctcacattgtcacctttgtcttttactgtgtggtactaccagcaactgttttggttcctgatattgaggttcccaggtggggagcagtttatatccctaccatcattaccatcctcaatgcagttggaactccaaggtcactccacttaatggttttctggatcctttttgagaatgtcatgtccctacatcggaccaaggctaccttcattggactgctggaaggcggtagagttaacgaatgggttgtaactgagaagctaggagatgctctcaaagttaaagcagccactaaggcacccaagaaaccacgattcaagattggagaaagactccatttgctggagcttggagttggagctttcctcttcttctgtggctgctatgatgttgcctttggaagaaatcactacttcatatacctttacgttcaagctattgccttcttcattgtggggtttggttatgttggcacctttgttcccaagtcttagagggaaatctgaggtgatgctgtacttttttgctactcggccggtcactctgcttgtgcctctctcttcttcagcctatctatgtggcgttcctagctacactttcccataacttttacattccatgttgtaaaaaataaaaataaaaccctccccccacccccaaaaaagaaagtctgcaaattcttttaagacagaacataagaaacagttgtttctcttgtgaatatccaagaaacctcaagaacagaaccaaacaaaatattgtgggaatgcaataggcagagaagaagatcaaggaggagcagcaagccaaggcaggttatcccatggtggatagttttaaacatttcggaatggtttgttttgtaattttgtagttattttcctttctcttctttgttgtggttgggattgttttgtgagagagaataaatcgatgggagcaagataattt

SEQ ID NO: 1677 - DNA, 2545 bp, Mimulus guttatus
tggaaaaaacagagctcttctatataaagtgattgtatctctctctttctctctccctcaccactcctccatctctttccctcctttttctctctctaccttcatttcctctgttttttttagttttttttctttcttccttccaccattactttttcccaccatttccattaaaaaaaaaaaaacaaaaaaaaacctgcatatcttttttctgcttcttctgattaaaaacaaaaccaaaaaaaaaaaaatcccagaaaaaagtgtttgtttttgcaaaaaaagaaaaaaaaaaaaagtaaatggggttacttgcgtgtatgtaaatatgtttgagcaaagtgttttctgacattccaccgctgcttcaattgttttggcgtccctcataagcaaaactacaagaaaaatattcgtccacttttcgccaacaagagagagaaagtgcgcctctatatacatacatatatatgtatatatagatcctcattcctcagagaaaccctcccctgttttcctctgttttcctctgttttttttttctaggtaagaaaaaacagaggacgagttaactcagaaaatggaccagttttcatcgacagccgtattgcccgaacccttttcgggtgcaagagatgatattacggagcaattcatgatcatttggggtcagatcaaggcgccgttaatcgtacctttgctcaacattgccgtgtttctgtgcctaacgatgtcggctatgttgtttatcgagagggtttacatggcggtcgtcattagtctgattaagctcttcggtcgaaagccggataaacgctacaaatgggagccgttgaaggacgatttggagctcgggaactcttcttaccctatggttcttgttcaaatcccaatgtacaatgaaaaagaggtgtatcagctatcgatcggagctgcatgcgggctgtcgtggccgtcggatcgaatcatagttcaggttcttgatgactcaactgatcccattatcaagaatatggtggaaatagagtgtcaaagatgggcaagcaaagggattaatattaagtacgaaattagggacaaccgaaatggctacaaagcaggtgcactgaaacagggcttaaaacactcttacgtaaagcaatgcgattttgtcgcaattttcgacgcggattttcagccagagcctgattttctgtggaaaacaattccgtttctagtgcataatcccgaactagccttggttcaggcgcgttggaaattcgttaatgcagatgaatgtttgatgacaaggatgcaagaaatgtcacttgactatcattttacagtggagcaagaagtgggctcatccacttatgctttctttggcttcaatggaactgctggtgtgtggagaattgcggcaattgacgaggccggtggatggaaggatcgaacgacggttgaggatatggacttagcggtacgcgctagtctcaaaggatggaaattcttgtatcttggttcacttcaggtaaaaaacgaattgccaagcacattcaaggcttaccggtatcaacaacatcgttggtcgtgcgggcccgctaatttgtttagaaaaatggttgtggagatcataagaaacaagaaagtaacattgtggaagaaggttcatgtgatatacagtttcttcttcataaggaagattgtagcgcacatagtcacgttcgtgttttactgcgtcgtactcccggctaccgtgttggtgcccgaagtttatatccctaaatggggcgccatttacattccttcgattatcaccatcctcaatgctgttggaactccaagatcactccacttgctagtattttggatactattcgaaaacgtaatgtcgttgcaccggacaaaagctaccttcatcggcttgttggaggcggggagagtcaacgagtggattgtgacggagaaactcggagatgctttcaaattgaaatcggcactcaaagcttttaagaaacctcgtttcaaaatcggcgaaagggttcatttcctggaggtagcgacgggggcatacttgttcttctgtggttgttacgacgtcgtttttggcaaaaaccactactacatatgcttatacgtgcaggcgatagcgttcttcattatgggattcagttacattggcacttttgtcccctcttagctctagcattagtacaatgaaaacttgtcatatttacttttgattttatgtgttttattttattattacaatattatatgtcgaggcgaagcggcgttcttcggcttattagaagttcttgctccaataattcccccttttttttttctttccttctttttgctctatatatgtagtgtcatttttacagttgatttgtttacttgtagaaattaaaagagagtgtattcttttaggttaagtataagagttcgagcaatcagacttgaatggaatttgtttgatttttcttgtgtatattttcgattcatcaattagatgaagtttatttaaagaaaaaaaaactatgctaaaaattgtactggc

SEQ ID NO: 1678 - DNA, 2542 bp, Sesamum indicum
cttcattctgcttctttctttctccattactttcccttgtatcaaacctgcattgtttctgtttctgatgaaaagggaattgacgaacgtgtggtgttttcattgttgagcttcgtggtgatgtataaaagggttgtgttatcctgaaatcttttgggtgaagggagtttttgttgatgaaaacagagtgggaggtttgagcaaagtgtgtttctctgacattccagctctgcttttgcttccgagggaagcaaaaattaaaagagatattcttgtgcttttcgcaaaggaggaaaagaaaaagcctatatatacccctcaacagatcttcatttttctctcaaaatctttcccctgtttttgcttttgtttaacactgaaatggagcagttctcatcgagtacgctgttgcccgacacgtttgcgggcggtagaggtgatatgactgagcaattcttggtaatatggagccagatcagggcgccgttgatcgtccctttgcttagagttgctgtgtttttgtgcttggcaatgtcggccatgttgttcgttgagagggtgtacatggcagttgtcattactctggtgaagctctttggtcggaagcccgacaaacgctacaaatgggagccattgaaggacgatttggagctcgggaactcggcttaccccatggttcttgttcaaattccaatgtacaatgagaaggaggtgtatcagctctcaatcggagctgcatgtgggctttcttggccatctgatcggattatcattcaagttctcgatgattcaactgaccccatcatcaagaatttggtggaaatggagtgccagagatgggcaagcaagggaataaacatcaagtacgaaattcgggacaacaggaatggttacaaagccggggcattgaaggaaggcctgaagcactcgtacgtgaagcaatgtgactacgttgccattttcgacgcggatttccaacctgaacctgatttcctttggcgaaccataccctttctagttcacaactcccaactcgccctcgttcaagcccgctggaaattcgtaaatgctgatgaatgcttgatgacaagattgcaagaaatgtcactggactatcatttcactgtggagcaagaagttggttcctccacatatgctttctttggcttcaatggaactgctggtgtgtggagaattgcagcaattaatgaggccggaggatggaaggatcggacgacggttgaggatatggacttggctgtccgggctagtctcaaaggatggaaattcttgtatcttggttctctcaaggtgaaaaacgaattgccaagcacgttcaaggcgtaccgctaccaacagcaccgttggtcgtgtggccctgccaatctgttcagaaaaatgcttgtcgagattataaggaacacgaaagtatcattgtggaagaaggttcatgtgatatacagtttcttcttcataagaaagattgtagcccatatagtcacattcgtgttctattgcgttgtactgcctgctactgtgttagtacctgaagtccagattcccaagtggggagccgtttacgtaccttcaatcatcacccttctcaatgcagttggaactccaagatcactccatttgctcgttttttggatccttttcgagaacgtaatgtctctgcaccgcacaaaagctaccttcattggcttgctggaggccgggagagtgaatgagtggatcgtcactgagaaactcggtgatgctcataaactgaaatcagcactcaaagctttcagacgacctcgcttccgacttggagaaagaatccatttgttagagcttgcaactggcggatacctcttcttctgcggttgctacgacatcgtgttcgggaagaatcactatttcatctacctcttccttcaggcaaccgccttcttcatcatgggatttggctatattggcacttttgtcccctcttaggacaaacgttacacgaggaatcgctcgttattttgtttttctgtttattaatagctgtggatgtgcgtcgtccgttgctggatcagcacagcgacgtggaagcagcaaagcgtctgcatgggagttcttgcttccatttggttttgttacattttatactgtttctttgtagaaagaatggtattcttttaggtttgagcataagagttcgagctgaggacttgaatggaatatgtctttcttgtgtatatttctcaaagtgaaaaatttacttggaatgaattattacacatgaaaaatgagaaacaaagctgtcatgagcccacatggtctttgttcctatttccaaaactaagcactgcaacaatgataataagtgtgcaagaaattatttgactagctttttagacagatttccgtctctggttgatttcgtagcaaatgtgttggacgaattgtcacaccactcgcatatcctgtctgtcttcgtcctttcagtgccttttggctgtctgaaagagacggccaacaagaaatgaaacagtgcaacactcaactaccg

SEQ ID NO: 1679 - DNA, 1837 bp, Lippia dulcis
attcaacgaagccctcccctgctttcccatcccctgtttttttccctggaaaaacagaggattcagtttcacactaaaatggacaggctttcgtcgacaaaccttctgcccgaaacttttacgggtgccagggatgatattacggaccaatttcagataatatggggtcagctcaaggcgccattgatcgtccccttgcttaatattgctgtctttctatgcttggcaatgtcggcaatgttgtttgttgaaagggtgtacatggccgttgtcatttgtctggttaaactattcggtagaaaacccgataaaagatacaaatgggagccattgaaagatgatttggagcttggaaactctgcttaccctatggttcttgtccaagttccaatgtacaacgaaagagaggtatatcagctctccattggagctgcatgtggcctttcatggccctccgatcgcattatagtccaagttctcgacgattcacagaccccattatcaagaatttagtggaaatggagtgccagagatgggcaagcaaagggataaacattaagtacgaaattcgggacaacagaaatggttacaaagccggcgccctaaaggaaggcctgaagcatccctacgtcaagcaatgtgaatatgtagcaattttcgacgccgatttccaaccagaacctgatttcctctggcgcacaattccctttctcgtgcacaaccctcagcttgcactcgtccaggcccgctggaaatttgttaatgcggatgaatgtttgatgacgagaatgcaagaaatgtcacttgattaccacttcaccgtggagcaagaagtgggttcctctacgcacgccttcttcggcttcaatggaactgctggggtgtggagaattgcagccattgatgaggctggaggatggaaagaccgtacaacagttgaggatatggatttggccgtgcgcgccagtcttaaaggatggaaattcctctatcttagttctctcaaggtgaaaaatgaattgccaagcacattcaaggcatatcgctaccagcagcaccgttggtcgtgcggccctgccaatctgttcagaaaaatgttggtggaaattataagaaacaagaaagtgtcgttgtggaagaaagttcatgtaatatacagtttcttcttcgtgaggaagattgttgcgcatttagtcaccttcatcttctactgcgtcgtgcttcctgccaccgtgttggtgcccgaggttcagattccgaaatggggtgcagtttacattccttcgatcattaccctcctaaatgcagttggaacgccaaggtcacttcacttgctagttttctggatccttttcgagaacgtgatgtcactacaccggacaaaagctaccttcatcggattgctggaagccggtagagtcaatgagtggattgtcacagaaaagctgggggacgctcttaagctaaaatcggctctaaaagctttcagacgacctcgtttcaaattcggagacagagtgcacctagctgagcttacaacgggggcttatctcttcttctgtggttgttacgacattgcctttggaaataaccattactacatatacctcttcattcaggcaatcgcgttcttcatcataggcttcggctacgtcggaacattcgtcccgtcttagcttcatcgacacggttcttcactggcattttgtggtttaattgttttttctctctcttactatactgttttttgttttcccttcgttacttgtagagagaacgttaattcttttaggtgaagcataagagttcgagctccggcttgaatgggaatttgttt

SEQ ID NO: 1680 - DNA, 2016 bp, Euonymus alatus
agagttttctgtctttgtaatgtataatatgagtgtttagattgagagatctctaataggcttcttgtccacctttttgtgtactgggtctccgaaatttgtacagttttggacctctctggcactgtgacattccagccctgcctccattgttttttgcgtacaccagaagcaagatcacagagcagacaaaaacaaaagggaaatattctctctgtttttcgtccctaaacctcctttaaatcgatgcagatctagtgggttttgtacaatactagttcacaacgtcccgtctgtgtctgtctcctccgttttcttgctctgtttctgtccgtattgaagaagaatccacaaatggagaagctatcttcaacaactcttcttcccgacacatttcagggagtcagcgacgacttatcattacaattatcaataatatggggtcagatcaaagcgccattgattgtgcctctcctgaggctcgcagttgtaatatgtctcgcaatgtcactgatgctcttcattgagagaatttatatgggcatagtcattgtcttgatcaagttttttggtcgaaaaccagagaagcgttacaagtgggaacccataaaagacgacattgagatcggtaactctgcttacccgatggtcctggtccaaatcccaatgtataatgaacgagaggtatatcagctctcgattggagctgcatgtggtctgtcctggccttctgacagaatcatgattcaagttcttgatgactcaacagacccaactatcaaggatctagtggagctggagtgtcaaagatggggaagcaaaggaattaacatgaagtatgaagtgagaaataacaggaatggttataaagcaggggctctgaaggaagggatgaagcacagctacgttaaaaactgcgattttgttgccattttcgacgctgacttccaacctgagcctgattttctgtggcgcaccattcctttcctggttcacaaccctcaattgggtctggttcaggctcgctggaaattcgtgaattctgatgagtgcttgatgacaagaatgcaagagatgtcacttgattaccattttacagtggaacaacaagtagggtcctccacatatgccttcttcggcttcaatgggacagccggtgtatggagaatatctgcactgaatgaggctggaggttggaaggaccggaccactgtggaggatatggatcttgctgtccgagccagtctcagaggctggaaatttctctaccttggcactctcaagacgaaaaatgagctgccaagtactttcaaggcgtaccgatatcaacagcacagatggtcatgtggtcctgctaatctcttcagaaaaatggttatggagattatactaaacaagaaagtgacattgtggaagaagattcacgttatttacagcttcttcttggttaggaagatcatagcccacctggtcacattctttttctactgcgttgtgttaccagcaactgttttagttccggaagtagaggttccaaagtggggagctgtttacattccttccatcattaccattctcaacgcagttggtactccaaggtcattacatcttctggttttctggatcctttttgagaacgtaatgtctctgcaccggagtaaggcaactcttgttggcttgctagaggctgcaagagtgaatgaatggattgtcactgaaaagctaggagatgttctcaagtccaaggcagccattaaagcacccaagaaagctcgcttcaggtttggagaaaggctgcatatgttggagcttggaatgggagcttatctcttctttatcggctgctacgatgttgtcttcgggaaaaaccattattacttttatctttatgttcaagcccttgccttctttatcatgggattcggatatgttggcaccttcgtccccaactcgtagtaatttggttatgtgctcttcagcgccataagcttgtgtaaagagacccaaaaggggtaa

SEQ ID NO: 1681 - DNA, 2386 bp, Euonymus alatus
ttgcacttccttctatttttccttttcaacgttttcattatgtgtttttctgcttctataatgtctctttgattatagaagcagaaagattcctcattttctgttttccttcttgtaaagaatttctgtttctacgaagagaaaaacttaagcattttaggaatcaaagctttgtatttgattattgggtatctgaaattttgttcagtttggagctctggcactgacaattccattgttttgcgttcaccagaagcaaaaccacaaagcagagggagacaaaggggaaaatattctcttttttgtcgaggaagctcctttaaatcgatgcagatctagtgggttttgtacgaaaactgttaactgctgcctctacgccatttctgtctcctctgtttttcttgctctgttttcaggcatattgaagaagaacccataaatggagaggctatcttcaacaactcttctaccagaaacatttcagggagccagagatgacctgtcattgcaattatcaataatctgggctcaaatcaaagacccattgattgtgcctcttctgaagcttgcagttataatatgtctggcaatgtctttgatgctattcatcgagagagtttatatgggcatagtcattgtattgataaagattttcggtcaaaaaccagagaaacgttacaagtgggaacccataaaagacgacattgagatcggtaactctgcttatccgatggtcctggttcaaatcccaatgtacaatgaacgagaggtttatcagctatcaattggggctgcatgtggtctttcctggccttctgacagaatcataattcaagtcctcgacgactcaacagacccaactatcaaggatcttgtggagatggagtgtcaaagatggggaagcaaagggattaacataaagtatgaagtgagggataacaggagtggttataaagcaggggctctgaaggaaggcatgaagcgcagctacgttaaacattgcgattttgttgccatttttgacgctgatttccaacctgagcctgattttctgtggcgcaccattcccttccttgttcacaaccctcgattgggtctggttcaggctcgctggaaattcgtgaattctgatgagtgcttgatgacaagaatgcaagagatgtcactcgattaccattttacagtggagcaagaagtagggtcctccacccatgcattcttcggcttcaatgggacagccggtgtatggaggatatctgcaattaatgaggctggaggatggaaggaccggaccactgtggaggatatggatcttgctgtccgagccagtctcaaaggctggaaatttctctaccttggcattcttaaggtgaaaaatgagctgccaagtacattcaaggcgtaccgatatcagcagcacagatggtcttgtggtcctgctaatctcttcaggaaaatggctatggagattgtactaaacaagaaagtgactttgtggaagaagattcacgttatttacagcttcttcttggtcaggaagatcatagcccaccttgttacatttttcttttactgcattgtgttgccagcaactgttttagtaccagaagttgaggttccaaagtggggatctgtttacattccttccatcattaccattctcaacgcagttggtactccaaggtcattgcatcttatggttttctggatactttttgagaatgtaatgtcgctgcatcggagtaaggcaactctagttggcttgctagagactgctagagtgaatgagtggattgtcactgaaaaactaggagatgctctcaagtccaaggctcccaagaaacctcgcatcagacttggaggaagactgcatatgttggagctcggagttggagcttacctcttctttatcggctgctatgatgttctcttcgggaaaaaccattattacttttacctttatgtacaagcctctgccttcttcatcatgggatttggatatattggcaccatcgtccccaattcttagcaatttggagtatttgttggtaattcatcaccgtgcctgcagggtcatgtgcctcttcttcagcagcataagctttaaaaagagaccgaaaagggttattctttcaggtcaatcatgcgggataactcaaaatttgtagttgtttttgtgaatattttagacatttgagaaacttacaagcaaattcattacaaagagaagataaagaagcttatgggataaagagtaaagaccctaactagttgagtgaaactttttgagatttattggattttgtagtttgtcatcgtccttgatgtgttttgatgcggttgaattcgtttgagtgaaataaaccagtaagttttaaaaaaaaag

SEQ ID NO: 1682 - DNA, 2175 bp, Nicotiana benthamiana
cctgttttttcctctgttttttgtgggcaaaaaatggagaggatttcaacaacaacattgcttcctgatacattttatggaacaagagatgatataacagagcaatttgcaataatgtgggaacaaatcaaagctccattgattgtccctctcctcagaattgcagtgttattgtgtcttgctatgtctgttatgttgttcattgaaagagtttacatgtttattgtcatttctcttgtcaaactctttggtacaaaaccagagaaacgttataaatgggaaccattaaaagatgatgttgagcttgggaattcatcttatcctatggttcttgttcaaatacccatgtataatgaaaaagaggtttatcagctgtcaattggagctgcatgtggactttcatggccctctgatcgtattatagtacaagttcttgacgattcaacagacccctttactaagaatttggtggaaatggaatgtcaaagatgggcaagtaaaggaataaatataaaatatgaagtgagagataataggagtggatacaaagcaggagctttgaaagaagggctgaaacattcctatgttaaacaatgtgattatgttgctatatttgatgctgattttcaacctgaacctgatttcctttggcgtacaattccatttttagttcacaatcctgaactttcccttgttcaagctcgttggaaatatgtaaatgctgatgaatgtttaatgacaagaatgcaagaaatgtcattggattaccatttcactgtggagcaagaagtgggctctgccacccatgcctttttcggatttaatgggactgcaggtgtttggagaattgctgcaatagatgaggctggaggttggaaagacaggacaacagttgaggatatggaccttgctgtccgagctagtctcaagggctggaaattcttgtaccttagttctctcatggttaaaaatgaattaccaagtaccttcaaggcctaccgctatcaacaacatcgttggtcatgtggtccagccaatctcttcagaaaaatgtttatggagattgtaagaaataagaaagtgtcattgtggaagaaggttcatgtgatttatagcttcttctttgtgaggaaggtcgtagctcatatcgttactttcgtattctacgttgtagtattaccagcctctgtattagtgcctgaagttgaagttccgaagtggggagctgtttacattccagctatcataacactactcaatgcagtcggaactccgaggtcactccatttgctggtattttggatcctttttgagaatgtcatgtcactacaccgaacaaaggcgaccttcataggcttgttggaggtaggaagagtaaatgaatggattgttacagagaaattaggagatgctctcaagttaaaatcagccgccaaagcatttagaaaacatcgaatgaggcttggcgacaggattcacttgttagagcttgctgctggtgcgtacctcttcttctgtggatgttatgacattgccttcggaaataatcactatttcctttacctcttcattcaagcatttgctttcttcatcgtgggctttggttacgttggcacattcgtgccaaactcttagatgctgttcgtgaactggtattagggtatgaatcttgagcttttcaccctgtgctccacgctgtagcgcaaaaagaagtggcgttttcagtggcgttgcgcccctgcaatttgattatctttcattttcttgcttttgggtgttttctttcacttgtcaaaagaagaaaaaatggttattcttttaggttcaaagtgtaaaaggaattcgagccgtggctcgaatcttgtttgttttctttgtgtatattcaagaaacttaagggctacaataacaacaataataacaaaccaagtgtaatcccataaatggggtctaggaagggtaatgtatatatagatattacccttactttatgaagataaagagtttgttttccatagtaaaaagtttagggctatacagtaaaatcaagaaagtaaaagggtaatcactagtgctaagaggcacaaagtagtagctgaatctgttgttttttttctgtttttttttcctttctcagatgtacttggtttcaatacagagtgaaagtttcagaga

SEQ ID NO: 1683 - DNA, 2078 bp, Elaeis guineensis
ttccagggggctcgggacgacattacagagcagatggggctggtgtggcagcagatcaaagcgccggtcatcgtccccttgctccgcctcacggtgttcctctgcctggccatgtcggtgatgctgttcgtcgagaaagtgtacatggccgtcgtcatcgtcatcgtcaagctcttagggaagcggccggagaagcgctacagatgggagcccatgcgggacgacctggagctcggcaactccgcctatcccatggtcctcctccagatccccatgtacaacgaaaaagaggtgtatcagctgtccatcggagctgcatgcgggctatcatggccgtcggatcgaatcataatccaagtgcttgatgattccaccgaccctgttattaaggatctggtggagctggagtgccagcggtgggcgagcaaagggatcaacatcaagtacgagatccgggacaaccggaacgggtacaaggccggggcgctgaaggaaggcatgaagcacagctacgtcaaggactgcgactatgtcgccatcttcgacgccgacttccagccggagcccgacttccttttccgcaccatccctttcctcgtccataaccccgagcttgcactcgtccaggcccgctggaagttcgtcaattcagatgagtgcttgatgacaaggatgcaggagatgtccctggattaccacttcaccgtggagcaggaagtgggatccttaacctatgccttttttggcttcaatggtactgctggggtgtggcggatatcagctcttagagaagcaggaggttggaaagatcggaccacagtagaggacatggatttagctgttcgagcaagccttaagggttggaaatttgtattccttggagacctcaaggttaaaaatgaactaccgagtactctcaaggcttaccgttatcagcaacacaggtggtcttgtggaccagcaaatttgttcagaaaaatgttgttggagattgtaaggaacaagaaagtatctctcttcaagaaagtgcatgtgatctacaatttcttcttcgtgcggaagattgtagcccatattgtaacctttgtgttctactgtctggtaatccctgcaactgttttggtccctgaggtgcagataccaaagtggggtgcagtttatatcccctcaatcattacccttctcaatgctgttggaactccaaggtctcttcacttgctcgtattttggatcctttttgagaatgtcatgtctctgcatcgaacgaaagcaacttttattggcctgttggaagtagggagagtgaatgaatgggtggtcacagagaagttgggagatgctttaaaaatgaaaatggctgccaaagccaccaggaagccacggatcaggataggtgacagattgcatctgttggagcttggtgttggagcctatctcttcttctgcgggtgttatgatgtggccttcggaaagaaccatttcttcatatacctcttcctccaagcaactgctttcttcattgttggttttggttatgttggcaccttcgtctcccattcctaatggaccttggttggacgtcttgccaaagcctttgttattcattgtttccgccatcatgtctttctgaggtcacgcgtacaagcatgagcagcgtaatttgatgtttttttgcaacagcacaaattcttagtctccactggtgcgaagcattcttgcgtagatagaattcacttgtgtatagtcgattttagaggtacaagtgttgttgtctgctattagatacaaaggagatcagagacaatgaacaagtaggaagttttgggtctccttcagggaagctgcagcaggagagaccaaactttaatctgatgttgataatgtataaagaaacacgtctagatggattttgagtggtgggcttttcaagtttttattctttcccctttctttgcaagttaatgtttgagaagagaaaaataaggtgatagcataaaagtaaattgtggaatttttttttttatttctatctttgctatttgctttgtaataaggagacgatatagttggtcagtttt

SEQ ID NO: 1684 - DNA, 2012 bp, Rosmarinus officinalis
ttgcgtctcacagaagcaaaatcaaaagaaatattcttgcgcttttcgcaaaggagagaaaggcaaacgctatatatacataccctcgcaaacagatctcgattttccacacaacatcctgctcctctgtttctagcaacgcaaccccccccccagtgctcaattattaccatcctcctctgtttcttcttacgcaaaaacagaggaatcgaacaaaacaaaaacctaaatggagcggctctcgtcgacgacggttctgccggaaaccttctccggcgtccatgacgacatgacggagcaattcctgataatttggggccagatcaaagctccgttaatcgtgccgttgctcaacgtcgccgtgttcctgtgcttggcaatgtcggcgatgctgttcatcgagagggtgtacatggccgtcgtcatcactctcgtcaaaatcttcggcgggaaacctgataagagatacaaatgggagccgttgaaggacgatttggagcacggcaactccacctacccaatggtcctcgtccaaatcccaatgttcaacgaaagagaggtctatcagctctcgatcggagctgcatgcggcctatcctggccgtccgatcgaatcatagtccaagttctcgatgattcaaccgaccacacgatcaagaatatggtggaaatggagtgccagagatgggcgagcaaagggataaacatcaaatatgaaattcgagacaacagaaacggatacaaagccggagctcttaaagaaggactcaagcgctcctacgtcaaacagtgcgaatacgtggcaatattcgacgcagatttccagccggagccggatttcctgtggcgaaccatccctttcctcgtccacaactccgagctcgccctcgtccaagctcgctggaagtttgtgaatgccaatgaatgcttgatgacgaggatgcaagaaatgtccctcgactatcatttcacagtggagcaagaagtaggctcatccacctatgctttttttggcttcaatggaactgccggtgtgtggagaatcgcagcaatcgaggaggcgggaggatggaaagatcgaacgacggttgaagatatggacttggcggttcgtgctagtcttaaaggatggaaattcttgtatcttggctctctagaggtgaaaaacgagttgcctagcacgttcaaggcatatagataccaacaacatcgatggtcgtgtggccctgcaaatctgtttaggaagatgttgtccgagattataaaaaacaagaaagtgtcattgtggaagaaagtgcatgtgatatacagtttcttcttcataaggaagatcgtagcgcacatagtcacgttcatgttctactgcgttgtgctgcctgctaccgtgttggtaccggaagttgagatcccaaaatggggcgccgtttacataccttccatcatcaccctcctcaacgcagttggaactccgaggtcactccatttgcttgttttctggatcctattcgagaacgtgatgtcactacaccgtgccaaggcgaccatgatcgggttgcttgaggcggggagagtgaatgagtggattgtcaccgagaaacttggcgacgcccttaggttgaaatcggcactcaaagctttcaagaaacctcggtttaggattggagatagaatccatttcttggagcttgctactggctgctacctcttcttctgcggctgctatgacattgcatttgggaagaaccactttttcatatacctttttgtgcaggcaacggccttcttcgtcatgggattcggctatgttggcacctttgtcccttcttgagacgaggaactgctcagtcttgagcaacgtggcttcaaagctcttgcttctctttctctttctctttgtttttcccccgtcttgtgtatattatgaagttggatcacagaaaattgaaaataacatgtttttgtttgtatcaattgccaagtcaagaaaacagagagggcaggatttcattttc

SEQ ID NO: 1685 - DNA, 3017 bp, Amborella trichopoda
agtctcagagttggctgctctctctgcaccctctctctctctaactctttctctctctaaaaaaaagcaaagcagagagagacgaggagccattataaccagagggccgagaaaaccagagacccaaaaccaggcattagccatttaaagcagaaagggaagctttttagaggggtcctctccatgccttctcagaagcagaaccagttataaaaggccccaacttgctcagtggagattcagaattgcagggatagaaacaaatcaaaagaggagttagacagggaaacatagctatatttggagagagaaagagctgtacaaagattcgcccttcaaaactgccgttgaatgagtttttgctagatttagaggagaaatttattgctgtttatcttctctctaattttgggggaagctttcagctttaaggctctgccaatggcaatgtgatcgaatggagtgttgtttctctctctatctctgacactccattgcgtaattgagcagcaaattctgcaaagtggtggtggtggtgatggtgggtcatttctctctctctctaccctttaaatcctcatagatctgacccattcttgaggcattgctccaagtcactccctctttcctctctctctagattcaggccaaaaaaagcaggggagagagaaaattgtcacaccccatttctctgtttctctctctagtttcaggccaatagaacaggggagggagaaaattctcgacgatccatctctctgtttctctctctagctccaaatggaccggctttcacggaccggcctcttaccagaggcttttcaaggaacaggagatgacattactgatcaaatggccattatttggcaacagatcagagctccattgattgttcctctgctaaaattagcagtgttcttgtgcttaatcatgtctctgatgcttttcatggagagagtttatatggcagtggttatagtgcttgttaaactctttggtaaaaaaccagggaagcgttacaaatgggaagccattaaagatgatttggagctcggcaatgcgaattatcccatggttctggttcagatccctatgtacaatgagaaagaggtttaccaactgtctattggagctgcatgtgggctttcatggccgtcggatcgcatcatcattcaagtgctggatgattctactgatccaacgatcaaggatcttgtggagctagagtgccagaggtgggcaagcaaagggatcaatataaagtatgagatcagagacaacaggaacggttacaaagctggagctctcaaagaaggaatgaagcatggctatgtgcgagactgcgactacgtcgccatttttgatgccgatttccaacctgaaccagatttcctctggagaacaatccctttcttgattcacaatccagagattggccttgttcaggctcgatggaaattcgtgaattcggacgaatgtttgatgacaaggatgcaagagatgtctctcgactaccattttacagtggagcaggaagtgggttcttccacctacgcattctttggcttcaatgggactgctggtgtatggagaattgctgctctgaatgaggcaggaggctggaaagataggaccacagtggaggacatggatttggctgtgagagctagtctcaaaggctggaaatttgtctatttgggagacctcaaggtgaagaacgagttgccaagtaccttcaaagcatacaggtaccagcaacataggtggtcctgtggtcctgctaacctctttaggaagatggccatggagatcttcaggaacaagagagtgtctctttggaagaagattcatgtcatttataacttcttcttcgtgagaaagatcgtggctcacattgtcaccttcgtgttctactgtgtggtgatcccggccactgttcttgtccctgaagttgaaatcccaaagtggggagctgtttatatcccttccaccattaccatccttaatgcattgagcagcccaaggtctcttcacttggtggttttctggatcctcttcgagaatgtgatgtctctacaccgaacaaaggcaacctttatcggtttggctgaagcaaggagagttaatgaatgggttgtgaccgaaaagcttggagatgctctaaaaggcaaagcggggggcaaatcagttaaaaaattctggatcagaataggcggcaagttgcatctcttggaattgggagtgggagcctatctcttcttctgtgcatgctatgacctagccttcggaaagaaccactacttcatctatctctaccttcaagctatggccttcttcatcatgggctttggctatatcggcacctttgttcctcactcttaggcagccgtgatatctctctgcgtcgacttttgtgcttctcattgtcagttcacatttgttcagtttctttctcatccaagaagatgcataagtgcaaagaacactcaaattctttatgatgggagaagcatcaagaagaagaattccttcccccagagccataagactctgtgaataccatttcttggtttattctacagtcatttatagagaggcttccatctcagtagcctagtttgtttgaattttcagtatatacacagaaaaagagagaaaaatatgtattattggaactctgatgtaaagaaagaagagtagttttggtgaatgggatttgtaattgtgagtgactctgtttttttgggtagtttgtaagaggtgaaaataagaaaagcttggatgcataaaggagggccaatttgtatctctttcctagtagtcataggagtagaataatggtttatatggtatctttgcagggtggtccaaagtattcttttgtactctgtccctccttcaattcatctccatttgggttcaataaaggagaagcctgttttctatgtactccaagtctatatggagctaaaaccatgatgttaatgctacattgctagaaaggaaggtttgaggtt

SEQ ID NO: 1686 - DNA, 1834 bp, Brassica juncea
ttttctctttctcaccggagtaaggagagatggagctcggtgattcttcggcggtgattccagactcgttcatgggatacagagacgacatcacaatgcaaatgtcaatgatcttggaccagattcgagctccactgattgtcccagtccttaggctcgcagtttatatctgtttaacgatgtcggtgatgctatttgtggaaagggtttacatgggaatagtaatctctcttgtgaaactctttggtcggaagccagagaaacgtttcaaatgggaaccgatgaaagacgacattgagcttggaaactctgtttatcctatggttcttgttcaaatcccaatgtacaacgaacgagaggtttatcagctatctattggagctgcttgtgggctctcgtggccgtctgacagaatcgtcattcaagttcttgatgattccactgacccaacgatcaaagatctagtggagatggagtgtagcagatgggcgagtaaaggagtgaacataaagtatgagatcagagataacagaaacgggtacaaagctggagctttgaaagaaggtatgaagaagagttacgtcaaaagctgcgattacgtggcgatcttcgacgccgattttcagcctgaaccggattatctctggagaaccgtaccgttcctcctccataaccctaagcttgctctcgttcaagctcgctggaaattcgtaaattcggatgaatgtttgatgacaagaatgcaagaaatgtctttggattatcattttatggtcgaacaagaagttggttcttctacttacgccttcttcggtttcaacgggactgcgggaatatggagaatatcggcattaaacgaagctggtggttggaaagatagaacgaccgtagaagatatggacttagccgttcgagctagtctcaagggttggaaatttttgtaccttggttctttgaaggttaaaaacgagttgccaagtacattcaaggcgtataggtatcaacagcacaggtggtcatgtggtccagctaatcttttcaggaaaatggcatttgaaatcatgaccaacaagaacgtgacattatggaagaaagttcatgtgatatatagcttcttcgtggtgagaaagatcgtggcacacattgttacattcatcttctattgtgtggtcttaccggctacggttcttgtaccggaagttaccgtaccgaaatggggagcggtttacattccttccatcattactctgctcaacgccgtcggtacacctaggtcactgcatctcatggtattttggattctgttcgagaatgtgatgtctcttcacagaacaaaagctactttcatcggtttactcgaaggaggaagagttaacgagtggattgtcaccgagaagcttggagatcttaaggctaaatcagcaaccaaggctccaaagaagcttcgttttagatttggagatagaatccatgtgttggaactcggcgtaggaatgtatttgttctctgtgggatgttatgacgcgttatttgggaagaatcattattatctataccttttcgcgcaagcaatcgccttcttcatcgctggatgcgggcagattgggacaattgtgcctaactattgaagggggaagtagttcttgagcgacaaactgctcgagaataagatgatgctttatctttttttcttggatactctttttaatttcttgctggtgtgaatagagagaattgatgatacgattacgattgttacagaagattggtgtgtgtagttgtggaagatatggatacttatagtgaacaagaatatatatattttcaagggggg

SEQ ID NO: 1687 - DNA, 2025 bp, Brassica napus
actaaacaaataatcccttttgtcagacaatctgagtttctatcaagtaaaactctgtctctctgtattgtcctcctctttgattacttgatcaaaagaaactcctttaaagtatcacattgtaccctatcgcgtgtctcacaagaaaagatctagggttcttgcttcctcctctgtttttttttctctttctcaccggagtaaggagagatggagctcggtgattcttcggcggtgattccagactcgttcatgggatacagagacgacatcacaatgcaaatgtcaatgatcttggatcagattcgagctccgttgatcgtcccagtcctcagactcgcagtttacatctgtttaacgatgtcggtgatgctatttgtggaaagggtttacatgggaatagtaatctcactcgtgaaactctttggtcggaagccagagaaacgtttcaaatgggaaccgatgaaagacgacatcgagcttggaaactctgtttatcctatggttcttgttcaaatcccaatgtacaacgaacgagaggtttatcagctatctattggagctgcttgtgggctctcgtggccgtctgacagaatcgtcattcaagttcttgatgattccactgacccaacgatcaaagatctagtggagatggagtgtagtagatgggcgagtaaaggagtgaacataaagtatgagatcagagacaacagaaacgggtacaaagctggagctttgaaagaaggtatgaagaagagttacgtcaaaagctgtgactacgtggcgatcttcgacgctgattttcagcctgaaccggattatctctggagaaccgtaccgttcctcctccataaccctaagcttgctctcgttcaagctcgctggaaattcgtaaattcggatgaatgtttaatgacaagaatgcaagaaatgtcgttggattatcattttacggtcgaacaagaagttggttcttctacatacgcattcttcggtttcaacgggactgcgggaatatggagaatatcggcattaaacgaagctggtggttggaaagatagaacgaccgtagaagatatggatttggccgttcgagctagtctcaagggttggaaatttttgtaccttggttctttgaaggttaaaaacgagttaccaagtacattcaaggcgtataggtatcaacagcacaggtggtcatgtggtccagcaaatcttttcaggaaaatggcatttgaaatcatgaccaacaagaacgtgacattatggaagaaagttcatgtgatatatagcttcttcgtggtgagaaagatcgtggcacacattgttacattcatcttctattgtgtggtcttaccggctacggttcttgtacctgaagttattgtacctaaatggggagcggtttacattccgtccatcattactctcctcaacgccgtcggtacacctaggtcactacatctcatggtattttggattttgttcgagaatgtgatgtctcttcacagaacaaaagctaccttcatcggtttactcgaaggaggaagagttaacgagtggattgtcactgagaagctcggtgatctcaaggctaagtcagcaaccaaggctccaaagaagcttcgttttagatttggagatagaatccatgtgttggaactcggtgtaggaatgtatctgttttctatcggatgctatgacgcgttatttgggaagaatcattattatctataccttttcgcgcaagcaatcgccttcttcatcgctggatgtgggcagattgggacagtggtgcctaactattgaatggaaaatggatttatcgagcgacaaactgctcgagaataagatgatgattttatatttttttcttggctactctttaatttcttgctggtgtgaatagagagaattgatgatacgattgttacagaagatggtgtgtgtagttgtggaagatatggatacttatagtaaagaagaatatatatatattttcaaggggggttttcatattcctca

SEQ ID NO: 1688 - DNA, 1686 bp, Brassica napus
tctttctgtcgtccaagtaagaagaaatggagctgggagattcgtcggccgtgattccggactcgttcatgggatacagagacgacatcacaatgcaaatgacaatgatcttggatcagattcgagctccattgatcgtcccagtccttaggctcgcagtttacatctgcttaacgatgtcggtgatgcttttcgtcgaaagggtttacatgggaatagtaatctctcttgttaaactctttggtcggaagccagagaaacgcttcaaatgggaaccaatgaaagacgacatcgagcatggtaactctgtttatcctatggttcttgtccaaatcccaatgtacaacgaacgagaggtttatcagctttctattggagctgcttgtgggctctcatggccgtctgatagaatcgttattcaagttcttgatgattccactgatccaacgatcaaagatctagtggagaaggagtgtagcaggtgggcgagtaaaggaataaacataaagtatgagataagagataacagaaacgggtacaaagctggagctttgaaagaaggtatgaagaagagttatgtcaaaagctgtgattacgttgcaatcttcgacgctgattttcagcctgaaccggattatctctggagaaccgtaccgttcctcctccataaccctaagcttgctttagttcaagctcgctggaaattcgtaaattcggatgaatgtttgatgacaaggatgcaagaaatgtctttggattatcattttacggtcgaacaagaagttggttcttctacttacgccttcttcggtttcaacggaactgccggaatatggagaatatcggcattaagcgaagctggtggttggaaagatagaacgaccgtggaagatatggatttggccgttcgagctagtctcaagggttggaaatttttgtaccttggctccttgaaggttaaaaacgagttgccaagtacattcaaggcgtataggtatcaacagcataggtggtcatgtggtccagcaaatcttttcaggaaaatggcactcgaaatcatgaccaacaagaacgtgacattatggaagaaagttcatgtgatatatagcttcttcgtggtcagaaagatcgtggcacacattgttaccttcatcttttattgtgtggtcttaccggctacggttcttgtaccggaagtaaccgtaccgaaatggggagcggtttacattccttccatcattactctgcttaacgccgtcggtacaccaaggtcattgcatcttatggtgttttggattctattcgagaacgtgatgtctctccacagaacaaaagctacattcatcggtttactcgaaggtggtagagttaacgagtggattgttactgagaaactaggagatcttaaggctaaatccgcaaccaagactctaaagaagcttcgttttagattcggagataggattcatgtgttggaacttggcgtaggaatgtatttgttctttgtgggatgttatgacgtgttctttgggaagaatcattattacctataccttttcgcgcaagcaatcgcgttcttcattgcgggattagggcaaattgggacgattgtgcctaactcttgaaggaaaaaaatgagttttctcgagaataagaggatgatttacttccttttttttttttttt

SEQ ID NO: 1689 - DNA, 1609 bp, Citrus clementina
ccacaactacaatggacgcagcttcagcggccaccatcatttttcctgacaggatttcgggccaaatgggattgatgtggcagcaaacgaaggcgccattgatcgtgccattgttgaaactgttagtgtacttgtgcttggccttgtcaataatgctcttcgttgaaagagtttacatggggattgtcattgtcttgctgaaattatttggccgaaaacccgaaaaaagatacaaatgggaggctattaaggatgatgttgaacttggtaactcagcttatcctatggtcttggtacaaattccaatgtacaatgaaaaagaggtttatcagctatctattggagctgcatgtgggctctcatggccgtctgatcggattacaattcaagttcttgatgactcaacagacccaacaattaaggatttggtggagctagagtgccaaagatgggcaagcaaaggcataaacataaagtatgagataagagataatagaaatggatacaaagctggggctctaaaagaaggcatgaagcatagctatgttaagcaatgcgactacgttgcaatttttgatgctgactttcagcctgaacctgactttctttggcgcaccattccatttctcgtacacaacccagatattgctcttgtccaagctcgctggaaatttgttaatgcagatgaatgcttaatgacaaggatgcaagagatgtcactagattaccatttcactgtggaacaagaagttggctcttcaacctatgccttctttggtttcaatgggacagctggtgtatggagaatttcagcactcaatgaggctggagggtggaaggacagaaccactgtggaggacatggatttagcagttagagccagtctcaaaggctggaaatttgtttatgttggtgacctcaaggtgaaaaatgaattgccaagtacgttcaaggcctatagatatcaacagcacagatggtcttgtggccctgccaatctcttcaagaaaatggtaggagaaatcatgagaacaaagaaagtcactctgtggaagaagttgtatgtgatttacagtttctttttcgtccggaaagttgttgcacatattgtcacatttgtattctactgcgtccttttgccggcaactgttttgtttcctgaagttgaagttcccaaatggggagctgtctatattccttccatcatcactctccttaatgcagttggcactccaagatcactccacctattggttttctggatcctatttgaaaacgtcatgtcgttgcatcgaaccaaggccacattcatcggcttgctggaggccggaagagttaatgaatgggttgtcacggagaaattgggagatgtcaagtcaaaactaggcggaaaaactctcaagaaacctcgtattaggattggagaaagggtgcatgtgctagagcttggtgttggggcttacctcttcctttgtggctgctatgatgttgctttcggaaagaatcattatttcatatacctgtttcttcaatccattgccttcttcgtcgccggagttggttatgttggcacatttgttcccaattcttagcagaattttatgggaag

SEQ ID NO: 1690 - DNA, 2364 bp, Eutrema parvulum
ctcacacatacaacacatacactgtctcttctctctctctgtttctgtttttagatctctctcctctcttcttcctttccaaaaatcaatcttctccttctccacctttcgttgttatctttcctctcttaccaaaccataaaaacaagaaaacaaacccacaaaaacaaaaaataaaattgaattctccttttttccgacaatctgagtttctcaggcagagaagacagagatttttcaccgcaaggaaaacaaaggaaaaactctgtctctctgtttcgtacttctctttgatttcttacgccaaaaagagacttctttaaagaatcacattgtaccctattgcgtgtctcacaagaaaatccctcagacacatattcctatttcctcatacggatttagggttcttgcttagtcctctgttttttttttctcgctcgcggccggagtaaaaagaaatggagttgggggactcggcggcagtgattccggactcgttcatgggatacagagacgacatcacaatgcaaatgtcaatgattctggatcagattcgagctccattgattgtgccagtgcttaggctcggagtttatatctgtttaacaatgtcggtgatgctttttgtcgaaagggtttacatgggaatagtaatctctcttgttaagctctttggtcggaagccagagaaacgtttcaaatgggaaccaatgaaagacgacatcgagcttggaaactctgtttatcctatggttcttattcaaatcccaatgtacaacgaacgagaggtttatcagctatctattggagctgcttgtgggctctcatggccgtctgatcgaatcgtcattcaagttcttgatgattccactgatccaacgatcaaagatctagtggagatggagtgtagtagatgggcgagtaaaggagtaaacataaagtatgaggtcagagataacagaaacggctacaaagctggagctttgaaagaagggatgaagaagagttatgtcaaaagctgcgattacgtcgcaatcttcgacgccgattttcagcctgaaccggattttctctggagaaccgtaccgtttctcctccacaacccaaagcttgctttagttcaagctcgctggaaattcgtaaatgcggatgaatgtttgatgacaaggatgcaagaaatgtctttagattatcattttaccgtcgaacaagaagttggttcttctacttacgccttcttcggattcaacgggactgcgggaatatggagaatatcagcattaagcgaagctggtggttggaaagatagaacgaccgtggaagatatggatttggccgtccgagctagtctcaagggttggcaatttttgtatcttggttctttaaaggttaaaaacgagttgccaagtacattcaaggcgtataggtatcaacagcacaggtggtcatgtggtccagcaaatcttttcaggaaaatggcattcgaaatcatgactaataagaacgtgactctatggaagaaagttcatgtgatatatagtttcttcgtggtgagaaagatcgtggcacacattgttactttcatcttctattgtgttatcttaccggctacggttcttgtgccggaagtttccgtaccgaaatggggagcggtttacattccttcggttattactctgctcaatgccgtcggtacaccgaggtcactgcatcttatggtgttttggattctgttcgagaacgtgatgtctcttcacagaacaaaagctaccttcatcggtttactcgaaggcggaagagttaacgagtggattgttactgagaagctcggagatcttaaggctaaatcagccaccaagactcccaagaagcttcgttttagatttggagatagaattcatgtgttggaactcggcgtaggaatgtatctgttctttgtgggatgttatgacgcattttttgggaagaatcattattatctttaccttttcgcacaagcaatcgcgttcttcatcgcgggatttgggcaaattgggacatttgtgcctaactcttgaagggaaaaaacgagttttcgagtgatgaagtgctcgagaataaaaagattatttcttttcttttcctttttggcttctctatttaaattcttgttggtgtgaatagagagaattcatgatacggttgttacagaagatggtttgtgtagtgtggaagaaatggatacttgtagtaaagaaaaaatatatttgaagggatttttctgattcctgaaaaggcaatagattattgacttttcgcaagacaaaaaaaatgttttgattccattttctttgtatgaaattatcgcattgtacaaatatggac

SEQ ID NO: 1691 - DNA, 2063 bp, Brassica oleracea
cttctccttctccacctttcgttattattaactttcctctcttaccaaaccatataaacattaaaaaacaaaagttaaaaagtttaattctctttgttcccgacaatctgagtgttttcaggcagagaagacagagatttttcaccttgccggaaaaaaaactttgtctctctgttccgtcctctttgatttctttacgccaaaagaaacttctttaaagaatcacattgcaccttcttgcgtgtttcacaaggatcacatatattctagggttcttgcttcctcctctgttttttcttttcaatttctcctctgtttttttctctttctgtcgtcggagtaagaagaaatggagctgggagattcgtcggcggtgattccggactcgttcatgggatacagagacgacatcacaatgcaaatgtcaatgatattggatcagattcgagctccattgatcgtcccagtccttaggctcgcagtttacatctgcttaacaatgtcggtgatgcttttcgtcgaaagggtttacatgggaatagtaatctctcttgttaaactctttggtcggaagccagagaaacgtttcaaatgggaaccaatgaaagacgacatcgagcatggtaactctgtttatcctatggttcttgtccaaatcccaatgtacaacgaacgagaggtttatcagctgtctattggagctgcttgtgggctctcatggccgtctgatagaatcgttattcaagttcttgatgattccactgatccaacgatcaaagatctagtggagaaggagtgtagtagatgggcgagtaaaggaataaacataaagtatgagataagagataacagaaacgggtacaaggctggagctttgaaagaaggtatgaagaagagttatgtcaaaagctgtgattacgttgcaatcttcgacgctgattttcagcctgaaccggattatctctggagaaccgtaccgttcctcctccataaccctaagcttgctttagttcaagctcgctggaaattcgtaaattcggatgaatgtttgatgacaaggatgcaagaaatgtctttggattatcattttacggtcgaacaagaagttggttcttctacttacgccttcttcggtttcaacggaactgccggaatatggagaatatcggcattaagcgaagctggtggttggaaagatagaacgaccgtggaagatatggatttggccgttcgagctagtctcaagggttggaaatttttgtaccttggctccttgaaggttaaaaacgagttgccaagtacattcaaggcgtataggtatcaacagcataggtggtcatgtggtccagcaaatcttttcaggaaaatggcattcgaaatcatgaccaacaagaacgtgacattatggaagaaagttcatgtgatatatagcttcttcgtggtgagaaagatcgtggcacacattgttaccttcatcttttattgtgtgatcttaccggctacggttcttgtaccggaagtaaccgtaccgaaatggggagcggtttacattccttccatcattactctgcttaacgccgtcggtacaccaaggtcattgcatcttatggtgttttggattctgttcgagaatgtgatgtctcttcacagaacaaaagctaccttcattggtttactcgaaggtggtagagttaacgagtggattgttactgagaagctaggagatcttaaggctaaatccgcaaccaagactccaaagaagcttcgttttagattcggagataggattcatgtgttggaacttggcgtaggaatgtatttgttctttgtgggatgctatgacgtgttctttgggaagaatcattattacctataccttttcgcgcaagcaatcgctttcttcattgcgggattagggcaaattgggacgattgtgcctaactcttgaagggaaaatgagttttctcgagaataagaggatgatttactcctttttttttttcatttggcttctctttttaaaattcttgttggtgtgaatagagagaattgatgatggtgtg

SEQ ID NO: 1692 - DNA, 2462 bp, Brassica rapa
aaataaaccaaaaattaaaagtggaaccatacaatacaagggcaaaggctttatataaagacattcatctctgtttcatttttcacacatacactgatacagacacactgtctcttctctctctctctgtttatgttcacagatctctctcctctcctcttcctttccaaaaccatctcctccttcaccacctttcattataatctttcctctcttaccaaaccataaaacaagaaacaaacctaaaaaacaaaaattaattctcctttttgtcagacaatctgagtttctatcaagtaaaaccctgtctctctgtattgtcctcctctttgattacttgatcaaaagaaactcctttaaagtatcacattgtaccctatcgcgtgtctcacaagaaaagatctagggttcttgcttcctcctctgtttttattctctttctcaccggagtaaggagagatggagctcggtgattcttcggcggtgattccagactcgttcatgggatacagagacgacatcacaatgcaaatatcaatgatcttggatcagattcgagctccgttgatcgtcccagtcctcagactcgcagtttacatctgtttaacgatgtcggtgatgctatttgtggaaagggtttacatgggaatagtaatctcactcgtgaaactctttggtcggaagccagagaaacgtttcaaatgggaaccgatgaaagacgacatcgagctcggaaactctgtttatcctatggttcttgttcaaatcccaatgtacaacgaacgagaggtttatcagctatctattggagctgcttgtgggctctcgtggccgtctgatcgaatcgtcattcaagttcttgatgattccactgacccaacgatcaaagatctagtggagatggagtgtagtaggtgggcgagtaaaggagtgaacataaagtatgagatcagagacaacagaaacgggtacaaagctggagctttgaaagaaggtatgaagaagagttacgtcaaaagctgtgactacgtggcgattttcgacgctgattttcagcctgaaccggattatctctggaaaaccgtaccgttcctcctccataaccctaagcttgctctcgttcaagctcgctggaaattcgtaaattcggatgaatgtttgatgacaagaatgcaagaaatgtcgttggattatcattttacggtcgaacaagaagttggttcttctacatacgcattcttcggtttcaacgggactgcgggaatatggagaatatcggcattaaacgaggctggtggttggaaagatagaacgaccgtagaagatatggatttggccgttcgagctagtctcaagggttggaaatttttgtaccttggttctttgaaggttaaaaacgagttaccaagtacattcaaggcgtataggtatcaacagcataggtggtcatgtggtccagcaaatcttttcaggaaaatggcatttgaaatcatgaccaacaagaacgtgacattatggaagaaagttcatgtgatatatagcttctttgtggtgagaaagatcgtggcacacattgttacattcatcttctattgtgtggtcttaccagctacggttcttgtacctgaagttattgtacctaaatggggagcggtttacattccgtccatcattactctcctcaacgccgtcggtacacctaggtcactccatctcatggtattttggattctgttcgagaatgtgatgtctcttcacagaacaaaagctactttcatcggtttactcgaaggaggaagagttaacgagtggattgtcactgagaagctcggtgatctcaaggctaagtcagcaaccaaggctccaaagaagcttcgttttagatttggagatagaatccatgtcttggaacttggtgtaggaatgtatctgttttctatcggatgctatgacgcgttatttgggaagaatcattattatctataccttttcgcgcaagcaatcgccttcttcatcgctggatgtgggcagattgggacagtggtgcctaactattgaatggaaaatggatttatcgagcgacaaacgtactgctcgagaataagatgatgattttatattttttcttggctactctttaatttcttgctggtgtgaatagagagaattgatgatacgattgttacagaagatggtgtgtgtagttgtggaagatatggatacttatagtaaagaagaatatatatatattttcaaggggggttttcatattcctcaaagacaatagatcatttcttgcaagacaaaagcttttgattccaatttctttgtattgtatttacaaatatggaggaacacgataatcacattctatgaaatagcttgcaacatgtaggatttgaaagaattgtcatcttttgcatcttttattcaaacaaacattgcctttgtggtcgctactt

SEQ ID NO: 1693 - DNA, 1816 bp, Brassica oleracea
tctatctcttttcggagtaagaagaaatggagcttggagattcagcggcggtgattccagactcgttcatgggatacagagacgacatcacaatgcaaatgtcaatgatcttggatcagattcgagctccgttgatcgtcccagtcctcagactcgcggtttacatctgtttaacgatgtcggtgatgctatttgtggaaagggtttacatgggaatagtaatctcactcgtgaaactctttggtcggaagccagagaaacgtttcaaatgggaaccgatgaaagacgacatcgagctcggaaactctgtttatcctatggttcttgttcaaatcccaatgtacaacgaacgagaggtttatcagctatctattggagctgcttgtgggctctcgtggccgtctgacagaatcgtcattcaagttcttgatgattccactgacccaacgatcaaagatctagtggagatggagtgtagtagatgggcgagtaaaggagtgaacataaagtatgagatcagagacaacagaaacgggtacaaagctggagctttgaaagaaggtatgaagaagagttacgtcaaaagctgtgactacgtggcgattttcgacgctgattttcagcctgaaccggattatctctggaaaaccgtaccgttcctcctccataaccctaagcttgctctcgttcaagctcgctggaaattcgtaaattcggatgaatgtttgatgacaagaatgcaagaaatgtcgttggattatcattttacggtcgaacaagaagttggttcttctacatacgcattcttcggtttcaacgggactgcgggaatatggagaatatcggcattaaacgaagctggtggttggaaagatagaacgaccgtagaagatatggatttggccgttcgagctagtctcaagggttggaaatttttgtaccttggttctttgaaggttaaaaacgagttaccaagtacattcaaggcgtataggtatcaacagcacaggtggtcatgtggtccagcaaatcttttcaggaaaatggcatttgaaatcatgaccaacaagaacgtgactttatggaagaaagttcatgtgatatatagcttcttcgtagtgagaaagatcgtggcacacattgttacattcatcttctattgtgtggtcttaccggctacggttcttgtacctgaagttattgtacctaaatggggagcggtttacattccgtccatcattactctcctcaacgccgtcggtacacctaggtcactacatctcatggtattttggattttgttcgagaatgtgatgtctcttcaccgaacaaaagctaccttcatcggtttactcgaaggaggaagagttaacgagtggattgtcactgagaagctcggtgatctcaaggctaagtcagcaaccaaggctccaaagaagcttcgttttagatttggagatagaatccatgtgttggaactcggtgtaggaatgtatctgttttctatcggatgctatgacgcgttatttgggaagaatcattattatctataccttttcgcgcaagcattcgccttcttcatcgctggatgtgggcagattgggacagtggtgcctaactattgaatggaaaatggattgatcgagctacaaactgctcgagaataagatgatgattttatatttttttcttggctactctttaatttcttcctggtgtgaatagagagaattgatgatacgattgttacagaagatggtgtgtgtagttgtggaagatatggatacttatagtaaagaagaatatatatattttc

SEQ ID NO: 1694 - DNA, 2730 bp, Musa acuminata
cgacagcctgcatttgcgcctggaactctatttcttgctcttcttttttgggtctctgtaaccttcaaccaacattaattcaccagtctttgtctctgttctttcttttttgtttaaggtgtttatttaaggagtgtggttaggacctcacagttggggcttcctcctcctcttcccgtggccttcctttccttcttggagctctcacgttaggatagcaggagggaaggaagagcatgcggacgtaaaatgcgtggcagattccagtagccgaaaagtataagcaacaccatcaatcatctttttttctcctgcttgttacgttctttctgtttgatatcgtctgtcgtcggagttttggaaaggagcaggggaagagaggggatcctttctttcacctgcgttcgtagttctgcttctacatatctgttgttgttggggttaggttttggaggggagacagagacctaaaagaaagctacatgtcgccttagctgttctgtcgatcgcttcttgcactctgcctgctgttcgttgtctcgaatccgtgtgttgggaagaaagagagatctggcgacagtcggctccaccgcattgtcttggcgtaattcctcagcaacagttgcagcaaatctctgacgattaatagttagcaagacaacgagcttctacttaaagaagaggaagagatccgccctttaaattgcctccagagctactggttgttccccaagtgctgctttctttcccagctttcctctgtttctggctggggagagatggacaggcttacttcgacggcccggctcccggagtcgttccaggggacgagggacgacatcggggggcagatggggatggtgtggcagcagatcaaggcgccggtgatcgtgccccttctgcggctcgctgtgttcctctgcttggtgatgtccgtgatgctcgtcgtcgagaaggtgtacatggccgtcgtcatcgttctcgtcaagctcttcggcagacggcccgagaagcgctacaagtgggagcccatgcgcgacgacctggagctcggcagctcagcctaccccatggtcctcgtccaaatccccatgtacaacgaaaaggaggtctaccagctctccatcggagctgcatgtggcctctcttggccatcggatcgaatcataatccaagtgctagacgattccacagacccagtcattaaggatttggtggagttggagtgccagcggtgggcgagcaagggcgtggacatcaagtacgagatcagggacaaccggaacggctacaaggccggggcgctcaaggagggcatgaagcggagctacgtgaagcactgcgactacgtcgtcatcttcgacgccgacttccagcccgagcccgacttcctctggcgcgccatccccttcctcatccacaaccccgacgtcggcctcgtccaagcccgatggaaatttgtgaattcggatgaatgcttgatgacgaggatgcaggagatgtcacttgattaccacttcacagtggagcaggaagttggatcctccacatacgcctttttcggcttcaatggaactgccggagtgtggcggattgctgctctcaacgaagctggaggttggaaggaccgaaccacagtagaggacatggatttggctgttcgagcaagcctcaagggctggaagttcgttaagaatgagctgccgagcacattcaaggcataccgctatcagcaacacaggtggtcttgtggcccagcaaacctattcaggaaaatggtgatggaaatcaagaacaacaagaaagtaggtctgtggaagaaggttcatgtgatctacagcttcttcttcgttcggaaggtggtagctcacatcgtgacctttgtattctactgcatcgttatccctgcgacggtgttggttcccgaggtagagatacccaagtggggtgcagtctacatcccttccatcattacccttctcaatgctgtcggaaccccacggtctcttcacttgcttgtgttttggatcctcttcgagaacgtcatgtctctgcacaggacgaaagccacctttattggcttgttggaagcagggagagtgaacgagtgggtggtcaccgagaagctgggggataccaagaagcccaaaatggctgccaaggcggcgaggaagctacgaatcaggatcggtgacagattgcatctgctggagctgtggacgggagcttacctcttcgtctgtgggtgttacgatgtggccttcgggaacagccatttcttcatatacctcttcctccaagcaatggctttcttcatcgtgggttttggttacgtcggcacattcgttcccagcacctgagcagccgcagtgtgcatgtgttgccaaaggcttcgcacgacttcatcttctacctcgatcagcttcgtaagttagagcagcctcaggtgttcgttgaaatgccgctgcttgaaagaaaccattatttctcagcagggggagaacactaggatgctcgtgtgaatatacagtcaagcgagtacctgtgtggtggtctatagaaacctaataaatacaggaagatgaaagaggaagatgaacgggtagggagaaaactggttagtctgatgaggattgtgtgcattcagaataagccttttcttctagatgaaatggtgatggtttgatttctgtaggatgtattccttgtttgaaaggttctgattgagaa

SEQ ID NO: 1695 - DNA, 1609 bp, Citrus sinensis
ccacaactacaatggacgcagcttcagcggccaccatcatttttcctgacaggatttcgggccaaatgggattgatgtggcagcaaacgaaggcgccattgatcgtgccattgttgaaactgttagtgtacttgtgcttggccttgtcaataatgctcttcgttgaaagagtttacatggggattgtcattgtcttgctgaaattatttggccgaaaacccgaaaaaagatacaaatgggaggctattaaggatgatgttgaacttggtaactcagcttatcctatggtcttggtacaaattccaatgtacaatgaaaaagaggtttatcagctatctattggagctgcatgtgggctctcatggccgtctgatcggattacaattcaagttcttgatgactcaacagacccaacaattaaggatttggtggagctagagtgccaaagatgggcaagcaaaggcataaacataaagtatgagataagagatagtagaaatggatacaaagctggggctctaaaagaaggcatgaagcatagctatgttaagcaatgtgactacgttgctatttttgatgctgactttgagcctgaacctgactttctttggcgcaccattccatttcttgtacacaacccagacattgcacttgtccaagctcgctggaaatttgttaatgcagatgaatgcttaatgacaaggatgcaagagatgtcactagattaccatttcactgtggaacaagaagttggctcttcaacctatgccttctttggtttcaatgggacagctggtgtatggagaatttcagcactcaatgaggctggagggtggaaggacagaaccactgtggaggacatggatttagcagttagagctagtctcaaaggctggaaatttgtttatgttggtgacctcaaggtgaaaaatgaattgccaagtacgttcaaggcctatagatatcaacagcacagatggtcttgtggccctgccaatctcttcaagaaaatggtaggagaaatcatgagaacaaagaaagtcactctgtggaagaagttgtatgtgatttacagtttctttttcgtccggaaagttgttgcacatattgtcacatttgtattctactgcgtccttttgccggcaactgttttgtttcctgaagttgaagttcccaaatggggagctgtctatattccttccatcatcactctccttaatgcagttggcactccaagatcactccacctattggttttctggatcctatttgaaaacgtcatgtcgttgcatcgaaccaaggccacattcatcggcttgctggaggccggaagagttaatgaatgggttgtcacggagaaattgggagatgtcaagtcaaaactaggcggaaaaactctcaagaaacctcgtattaggattggagaaagggtgcatgtgctagagcttggtgttggggcttacctcttcctttgtggctgctatgatgttgctttcggaaagaatcattatttcatatacctgtttcttcaatccattgccttcttcgtcgccggagttggttatgttggcacatttgttcccaattcttagcagaattttatgggaag

SEQ ID NO: 1696 - DNA, 1640 bp, Prunus persica
tccacaatggaacggctttcaacgacgacctttataccagatacatttttaggtgccagagatgacttttccatgcaaatgggagtgctttggagtaagatcagagccccattgatcgttcctctgctaagaatcacaattgtgctgtgcttgatcatgtcggttatgctcttcattgagaggctgtacatgggcattgtcattgttctgataaagctttttggacgaaaaccagataagagatacaattgggagcccatgaaagatgatgttgagttgggaaactcagcttatcccatggttctagtccaaatcccaatgtacaatgaaagagaggtttatcagctttcaataagagctgcatgtgggctatcttggccttctgataggatcatcattcaagtccttgatgattcaacagactcaactgtcaaggacatggtggagctagagtgccaaagatgggcaagcaaaggcataaacatcaagtacgagataagagacaacagaaatgggtacaaagctggggctctcaaagaaggcatgaagcgcagctacgttaaacactgcgattatgtcgccatctttgacgctgatttccaacctgagtcagattttctctgccgcaccattcccttccttgtccacaaccctgagattgctctcgttcagactcgctggaaattcgtgaactcaaatgagtgcttgatgacaagaatgcaagaaatgtcactggattatcatttcacagttgagcaagaagtgggctcctccactcatgccttctttggattcaatgggaccgctggtgtatggagaattgctgcaatcaatgaggctggaggatggaaggacagaaccacagtggaagatatggatcttgctgttcgagctagtctcaaaggctggaaatttgtatatcttggtagcataaaggtgaagaatgaattgccaagtactttcaaggcctaccgctaccaacagcacagatggtcttgtggtccagctaaccttttcaggaaaatggtcatggaaattataagaaacaagaaagtatcactatggaagaagatccatgtgatttacagcttcttcttcgtcaggaagatcatagcacatatcaacgcatttgtcttttactgcattgtcttaccggcaactgttttggttcctgaagttgtggtgccaaagtggggaggaatttatattccttccatcattactcttctcaatgcagttggcactccaaggtcactccacttattggtgttctggatcctatttgagaatgtcatgtcactacaccgtacgaaggctacaattatcggtctgctagaggctagtcgagtgaatgaatggattgtcactgagaaacttggagatgctcttaagactttgacagtagccgcaaaattacccaggaaacctcgaatcaggattggagaaagactacatttgctagagcttgctgttggatgttacctcttcttctgtggcacttatgactttgcctttgggaaaaactacgtcttccttttcctttacatccaagcaatggccttctatatcattgggtttgggtatgttgggacatttgttcccaactcatagtggggctgctgcagaaatactacaaaatt

SEQ ID NO: 1697 - DNA, 2317 bp, Brassica rapa
cacacacactcttctctctgtttccgtttatagatctctctcctctcttctttatttcttcccaagaatcatcttctccttctccacctttcgttattattaactttcctctcttaccaaaccatataaacattaaaaaacaaaagttaaaaagtttaattctctttgttcccgacaatctgagtgttttcaggcagagaagacagagatttttcaccttgccggaaaaaaaaactctgtctctctgttccgtcctcttagatttctttacgccaaaagaaactttttaaagaatcacattgtaccttcttgcgtgtttcacaaggatcacatatattctagggttcttgcttcctcctctgtttttttttctttctgtcgtccaagtaagaagaaatggagctcggcgattcagctgcggtgattccggactcgttcatgggatacagagacgacatcacaatgcaaatgacaatgatcttggatcagattcgagctccattgattgtcccagtccttaggctcgcagtttacatctgcttaacgatgtcggtgatgctattcgtggaaagggtctacatgggaatagtaatctctcttgttaaactctttggtcggaagccagagaaacgtttcaaatgggaaccaatgaaagacgacatcgagcatggtaactctgtttatcctatggttcttgtccaaatcccaatgtacaacgaacgagaggtttatcagctgtctattggagctgcttgtgggctctcatggccgtctgatagaatcgttattcaagttcttgatgattccactgatccaacgatcaaagatctagtggagaaggagtgtagtagatgggcgagtaaaggaataaacataaagtatgagataagagataacagaaacgggtacaaggctggagctttgaaagaaggtatgaagaagagttatgtcaaaagctgtgattacgttgcaatcttcgacgctgattttcagcctgaaccggattatctctggagaaccgtaccgttcctcctccataaccctaagcttgctttagttcaagctcgctggaaattcgtaaattcggatgaatgtttgatgacaaggatgcaagaaatgtctttggattatcattttacggtcgaacaagaagttggttcttctacttacgccttcttcggtttcaacggaactgccggaatatggagaatatcggcattaagcgaagctggtggttggaaagatagaacgaccgtggaagatatggatttggccgttcgagctagtctcaagggttggaaatttttgtaccttggctccttgaaggttaaaaacgaattgccaagtacattcaaggcgtataggtatcaacagcataggtggtcatgtggtccagcaaatcttttcaggaaaatggcattcgaaatcatgactaacaagaacgtgacattatggaagaaagttcatgtgatatatagcttcttcgtggttagaaagattgtagcacacattgttaccttcatcttttattgtgtgatcttaccggctacggttcttgtaccggaagtaaccgtaccgaaatggggagcggtttacattccttccatcattactctgcttaacgccgtcggtacaccaaggtcattgcatcttatggtgttttggattctattcgagaacgtgatgtctctccacagaacaaaagctacattcatcggtttactcgaaggtggtagagttaacgagtggattgttactgagaaactaggagatcttaaggctaaatccgcaaccaagactctaaagaagcttcgttttagattcggagataggattcatgtgttggaacttggcgtaggaatgtatctgttctttgtgggatgctatgacgtgttctttgggaagaatcattattacctataccttttcgcgcaagcaatcgcgttcttcattgcgggattagggcaaattgggacgattgtgcctaactcttgaagggaaaaatgagttttctcgagaataagaggatgatttactctttttttttttttttttcatttggcttctctttttaaaattcttgttggtgtgaatagagagaattgatgatggtgtgtagtgttgaagataagaatactttcagatttctcaaaagcaatagagtattggcgcttatggcaaggcagaaaatattttgattccattttctatgtattgaaatcatcatattgtatgaatatggacgcggtaggcctagttttgatacaaaggtttcaaccggaggatcagagcaaaccaatctgtagacaaatgatct

SEQ ID NO: 1698 - DNA, 2615 bp, Orobanche aegyptiaca
cacatttcctctgttttagtttttgttcttttctctttttctccattacccttcccaccatttgcattaattagtacctccaaatttctgcctgaaaaagaagaaaaagaaaaaaacagaaagcgtaatttatgattctttgaaaaaagaaaggttgatcaacgtgtgtttcttcattgttgaggcccattaaagggttttaagtttgagtccctgtaaaggctgcatttacatgaatcattttcttgttgcaaatagagtgaagtgttttctgacattctccacctcttctacctttgtttttgcgtccccaagaagcaaaattaagagaagaacatatattcttgcacttttcgcaaaggggatataatacaaacaaaaagtcctatatatacccttccaaacagatcttcattttccccgtgaaagctttttcccctgttttcctcttttctttccccctctgtttcaagaaacagaggatacatatttttgttgtaatattcttcttcaaattgttactagatggaccagttttcatccacaaaccttctccccgaaacattttcgggcgctagagatgattttaccgaacaattctcgattatatggggccagattaaggcgccattaatcgtgcctttgcttaacattgctgtcattttgtgcttggcaatgtcggccatgttgtttgttgagagggtttacatggcgattgttattagtcttgtgaaactatttggtaaaaaacctgataaaatgtacaaatgggagccattaaaggatgatttggagcttggaaactctgtttatccgatggttcttgtccaaattccgatgtacaatgaaaaagaggtttatcagctctcaattggtgctgcttgtgggctatcttggccctctgatcgcattatagttcaagttcttgatgactcaacagaccccataatcaagaatttggtagaaatggagtgtcagagatgggcaagcaagggtataaatatcaagtatgaaattcgagacaatagaaatggctacaaagcaggggctctaaaagaaggccttaaacactcttatgtaaagcaatgtgattacgtagcgattttcgacgcggattttcagcctgagcccgattttctgtggcaaacggtcccttttctagtgcacaatcctcaacttgctcttgttcaggcccgctggaaatttgtgaatgcggatgaatgcttaatgacgaggatgcaagaaatgtcacttgattatcattttacggtggagcaagaagtgggatcatctacatatgctttctttggcttcaatggaactgctggtgtgtggagaatagcagcaatcgaagaggccgggggatggaaagaccgtacaacagttgaggatatggatttagccgtacgtgctagtctcaaaggatggaaattcttgtatcttggctctataaaggtgaaaaacgaattaccgagcacgtttaaggcatatagatatcaacagcatcgttggtcatgtggccctgccaatctatttaggaaaatggcgatagagattttaagaaataagaaagtgtctttgtggaagaaggttcatgtaatatacagtttcttcttcataagaaagattgtagcgcatctagttacctttgtgttctattgtgttgtactccctgctactgtgctggtacctgaagtccacattcctaagtggggagcaatttacataccttcaattatcaccctcctcaatgcagtaggaactccaaggtcactccatttgcttgtgttttggatcctattcgagaatgtaatgtcactgcaccggacaaaagctacctttatcggcttgttggaagctgggagagttaacgagtggattgttacggagaaacttggagatgctcttaagttgaaatcgacccttaaagctttcagaagacctcggtttagaatcggagaaagggtccatttatttgagcttgctacgggcggatacctcttcttttgcggttgttacgacatagcgttcgggaaaaaccactattacatataccttttcgtgcaggcaatcgcgtttttcatcctgggtttcggttatgttggcacatttgtcccctcttagcatcacgagtacgatgaagctgctcatattttactttgttttcgtgtcgcgtgttattattaccatcttgcgctgtataaagacggcgttcgcagcaacatggccttcaagttgatgatttgtcgcctttttttaaactttatatactgcattttttgtgttacttgtgaaaagaatatatgtattcttttaggtgaagcatataagagttcgagctgagacttgaatggaatttatttttgttgtggatattttggaaaaagtggtcaccggaacatgaaaatctactttgtattgtgaacattttgtttttcaattttcaaattaagcacatagaggtagatcctgaggcagtaatatctttgcatttacatagtctttttttgggttttttcatattaaagcctgtcattagttattagttttttgtatggcttgtgtgtgtctgtaaagagaaagccaaatcataaccccttcgacaaaaaaaaaaa

SEQ ID NO: 1699 - DNA, 2991 bp, Sciadopitys verticillata
cacaaattcaattacataataaaaatgtacttggctaaaaatgaagccaggagctcgaaagtgataaactacttaaaaagctaaaattggctaaaaatgaagccaaggagctcgaaagtgataaacaacttaaaaaactaaaacaatcaaaccattactagaaatggttgacccaaagcaagtaagcgctaaactacaatacaagtatatacaatcatgccgagggggtaatcacagcagttgggcagagaccatcagtgaaaatgcaggctttgtggtgtctccactactacatataagaccggaagctctgcaatgtacaagcagtctaagcagaagcagcagtagacagcattgcttctgcagaagactctcaggctttgtttgcttgtgtttttgttgttgttgttttctgtgttttgtagtttaaataggcctgtaaggattcacacgtaatatccacatggtattgaggggcattaacgcgatttgtgttcaaactccattgggaaggtgttgaaagccaaggtatgtgcatgtgaaacggctgactctgaattgaatttctcaaaaaagggtgttgagatctccatcttaccagtggagttatttgacttgggattcatgttctgcaacacccacattgcagaattcatttgtcaatagatgaaatcccactgtcaggcctaacaatagcacatttgttctctttatgggattgtagaataataagatccagaacttggagcccagatccagactggtggcagcacatattggttgggtttagtaacttttttgaagctggtataaattcattatgggtaggatgtctagttcaggcctcattcctgagacatttcaaggtgccagagatgacatgactgagcagcttgcattgatatgggagcagttaagagcaccccttattgttccactgctgagacttgctgtttttatttgcttggccatgtctgtgatgttgtttgtggagagggtgtacatggctgtggtgatagtgctggtgaagctgtttgggaagaagcctgagaagaaatataagtgggagcctgtcaaggatgatatagagcttgggaacagtgcttatcctatggttttggtgcagattcctatgtataatgagaaagaggtgtaccaactttccattggagcagcatgtgggctctcatggccttcagaccgcatcattattcaagtccttgatgattctactgatccaactatcaaggatatggtggcaatggagtgtcagaggtgggcaagcaaaggcataaacatcaagtatgaaatcagagacaacagaaatggctataaggctggtgctcttaaggaagggatgaaaaggagctatgttaaggattgtgattatgtagccatctttgatgcagatttccaaccagagccagattacttgtggagaactattcccttcctgatgtacaatcctgaattgggcttggtccaagcccgctggaaatttgttaattcggacgaatgcttgatgacaagaatgcaagagatgtccctggactatcatttcactgtggaacaagaagtggggtcttctacttacgccttctttggcttcaacggaactgctggggtttggcgcattaatgctctaaatgaagctggtggttggaaagaccgcacaactgtcgaagacatggatttggctgttcgggctagtttgaaggggtggaagtttgtttttatcggtgatctcacagttaagaatgaattgcctagcactttcaaagcataccgctatcagcagcaccgctggtcttgcggccctgcaaatttgttcagaaagatggtcatggagatcattagaaataagaaagtgacagcttggaagaaatttcatgtgatctatgcattcttcttcgtccggaagattgttgcacaccttgtcacgttcatcttttactgtgttattattcctgcaacggtgctagtcccggaagtccacttaccaaagtggggtgctgtgtacattccttcaatcataactctactaaatgctgtaagcactcccaggtctctgcatctgcttgttttctggatcttgtttgaaaatgtaatgtctctgcatcgaaccaaggccaccatcattgggttgctagaagctggccgagtcaatgaatggattgtgacagagaagcttggagatgccttgaagcataaaccaggaaaacaagtcaaaaaaactcgctcaagaataggagaaagactgcacgttttggaactcttgactggtgtctatctcttcttctgtgcatcttatgatcttgcattcgggaagaaccacttttacatctatctctacctgcaagctgcagcattctttgtgatgggatttggatatattggaacttttgtacccacctcctagtactaaataagatggacagtgtcaccttatttgttttatttctattacatcctctatggcagatcaagccagatttgagttcaattatgtatgtatagattgtatcttctcattctttttaggtggataagtacacggtatagttccaagagggatggaacttctcgtgcataaaactgttacttatgcgagaagtgaagtttatagccctgtaatgtcccaaataaagttggattcaagttcatttgtccgacaatagtatattgggtatctcaagtggttctccaatgattgtatgggtgtctcaatttgaggtagctggggaaagagtcaatgtggtctaagtctgcaaccaactaaattaagatctacttaattatgaggactctatggatttgttacatgagataaaatactaccatccatgtgatgaaatccacagatgatattatttgaaacagaaggaatggtatcctgggaagaggatgggatggactttgtgcaaggttgatacccataattagtgggatttttggtttagcttcagaaatcgttgattccttggagatttt

SEQ ID NO: 1700 - DNA, 2302 bp, Eutrema halophilum
acactgtctcttctctctctctgtttctgtttttagatctctctcctctcttcttcctttccaaaaatcaatcttctccttctccacctttcgttgttatctttcctctcttaccaaaccataaaaacaagaaaacaaacccacaaaaacaaaaaataaaattgaattctccttttttccgacaatctgagtttctcaggcagagaagacagagatttttcaccgcaaggaaaacaaaggaaaaactctgtctctctgtttcgtacttctctttgatttcttacgccaaaaagagacttctttaaagaatcacattgtaccctattgcgtgtctcacaagaaaatccctcagacacatattcctatttcctcatacggatttagggttcttgcttagtcctctgttttttttttctcgctcgcggccggagtaaaaagaaatggagttgggggactcggcggcagtgattccggactcgttcatgggatacagagacgacatcacaatgcaaatgtcaatgattctggatcagattcgagctccattgattgtgccagtccttaggctcggagtttatatctgtttgacaatgtcggtgatgctctttgtcgaaagggtatacatgggaattgtaatctctcttgtgaagctctttggtcgaaaaccagagaaacgtttcaaatgggaaccaatgaaagacgacatcgagcatgggaactctgtatatcctatggttctagttcaaatcccaatgtacaacgaacgagaggtttatcagctatctatcggagctgcttgtgggctctcatggccgtctgatcgaatcgtcattcaagttcttgatgattccactgatcaaacgatcaaagatctagtggagatggagtgtagcagatgggcgagtaagggagtaaacataaagtatgagatcagagacaacagaaacggttacaaagctggagctttgaaagaaggaatgaagaagagttatgtcaaaagctgcgattacgtcgcaatcttcgacgccgattttcagcctgaatcggattttctctggaaaaccgtaccgtttctcctccataacccaaagcttgctctcgttcaagctcgctggaaattcgtaaattcggatgaatgtttgatgacaaggatgcaagaaatgtctttggattatcattttacggtagaacaagaagttggatcttctacttacgccttcttcggattcaacgggacggcgggaatatggaggatatcggcattaaacgaagctggtggttggaaagatagaacgaccgtggaagacatggatttggctgttcgagctagtctcaagggctggaaatttttgtacctcggttctttgaaggttaaaaacgagttgccaagtacattcaaagcatataggtatcaacagcacaggtggtcatgtggtccagcaaatcttttcaggaaaatggcattcgaaatcatgactaataagaacgtgactctatggaagaaagttcatgtgatatatagcttcttcgtggtgagaaagctcgtggcacacattgttacctttatcttctattgtgtgatcttaccggccacggttcttgtaccggaagtttccgtaccgaaatggggagcggtttacattccttcggttattactctgctcaatgccgtcggtacaccgaggtcactgcatcttatggtgttttggattctgttcgagaacgtgatgtctcttcacagaacaaaagctaccttcatcggtttactcgaaggcggaagagttaacgagtggattgttactgagaagctcggagatcttaaggctaaatcagccaccaagactcccaagaagcttcgttttagatttggagatagaattcatgtgttggaactcggcgtaggaatgtatctgttctttgtgggatgttatgacgcattttttgggaagaatcattattatctttaccttttcgcacaagcaatcgcgttcttcatcgcgggatttgggcaaattgggacatttgtgcctaactcttgaagggaaaaacgagttttcgagtgatgaagtgctcgagaataaaaagattatttcttttcttttcctttttggcttctctatttaaattcttgttggtgtgaatagagagaattcatgatacggttgttacagaagatggtttgtgtagtgtggaagaaatggatacttgtagtaaagaaaaaatatatttgaagggatttttcagattcctcaaaggcaattgattgttgacttatcgtaagacgaagaatctttttgaatcc

SEQ ID NO: 1701 - DNA, 2203 bp, Theobroma cacao
aagctactcctttataaccaaagcacgtatagtaacaccataacgtgtggtactttctcaggcaggctcctatttgtccataccaaagagctctgatggaccagatatcggagacgtccaggaccatgattccaggcacatttcaggtcagtcaggatgatattacaggccaagttgggttgatttggcagcaaacaaaagcgccattgatcgtgcctgtcttgaaaggtatggtggttttgtgtctggcaatgtcaataatgctttttgttgaaagggtgtatatgggaattgttatagtctttgtgaagttgtttgggagaaaacctgagaagatgtacaaattggagccaatgaaggatgatgttgagcttggttattctgcttatcccatggttctagtacaaatcccaatgtacaatgaaaaagaggtttatcagctatcaattggagctgcatgtgggctgtcatggccagctgatcggatcataattcaagtgctcgatgattcaacagatcctgccattaagaccctggtggaactagaatgccaaagatgggcaagcaaaggcataaacgtaaagtacgaaataagggacaacaggaatggatacaaggcaggtgctctcaaagaaggcatgaagcatagctatgtcaatcaatgtgactacgtggctatttttgacgctgatttccaacctgagccagacttcctctggcgcaccatcccgtttcttgtcagcaaccctgaaattgcacttgttcaagcacgttggaaatttgtcaactcagatgaatgcttaatgacaaggatgcaagagatgtcattggattaccatttcatagtggagcaagaagtggggtcttcaacccatgctttctttggtttcaatgggacggcaggtgtctggagaatttcggcactcaatgaagccgggggatggaaagacagaacaacagtggaggacatggatttggctgtccgagctagtcttaaaggctggaaattcgtttatgtcggtgacctcaaggtgaaaaatgaattgccaagtactttcaaggcctaccgataccaacagcacagatggtcatgtggccctgctaacctcttcaggaaaatggcagtggagatcataagaaataggaaagtttctctctggaagaagttttacgtgatctacagtttcttctttgtccggaagattgtggctcaccttgtcacatttattttctactgtgttgttttaccggcaactgtttttgttcctgaagtcgaggttcccaagtggggagctgtctacattccttctatcgtcactcttctcaatgctgttggaactccaaggtcattgcatctactgattttctggattctttttgagaatgtcatgtctctacatcggactaaggcaacatttattggtctgctggaggcagggagagtgaatgaatgggttgttacagagaaattgggagacgctctcaagacaaaattaggtggaaaagctcccaggaaaccccgcatccaaattggagaaagaatccatttgctagagcttgctgttggggcatacctcttcttctgtggctgctatgatctggcttttggaaagaatcgctacttcatattcctattcctgcaatctatcgccttcttcatagccggtgttggttatgttggaacctttgttccaacctcttagcaaaatcaatcaaacaaagaatcatctccgaagtcttatcattccccttctgtcttctccatatataagacacttcaatttctttgattgttattaatttttttcttttaattcaaattgttacagtttttagattattacagaaagggtggtcattcttttatgctgagcataagtggatttgagcaatcaagttgaattgtaattttctcttgtacaaacatgttcaagaaaaatgaaagcaattacggggaaatatcttaatatcaaggaccaggatccaatctatataattacttttccttcaatgtatactcagagatcaatttttcatcccagggaatataatttgctgctagcatattcagattgtataatgaaaggcttaaaaccaaataagcccctgagctatcaacaattagacaactgaatccttcttctattgtgtcaaattagagcccttctactttagcctcatccaatagaagccatttttgcta

SEQ ID NO: 1702 - DNA, 2637 bp, Prunus mume
aaacagagaagccaagaacacctcaaaaaattcaaagagagcttccattacagctagctctctgattctctctttgctagatctctcattttatctttctgtttctgtttctgtttttttttctgttgccgcattgtgtacatttatgcgctgttctgcttctgttttccttgttttcagaagcagaaaggttgtatttttaggaaaaggagaaagagagacggagcttctcgtgaggcttttatacaaatcttcaggtgctgtgttttctgtgcatttgagtttgtgtttgttttctcaaatgtggtggaggttgagccagtgaattaagctcttcctccattgtcttttgcgtatcagacctgcaaaatcacccacagaaaagaaaatactcgtgcttttttcagaaaaaaactttccgaatccattttagtctcttggatttctctcggaaaccagaaaaaagcaatctttacactttttcatagcttgcttcatcccatttgcctctcctctgtttctggttctgtttttcttgagaagaaatcacagaaatagtccacaatggaacggctttcaacgacgacctttataccagatacatttttaggtgccagagatgacttttccatgcaaatgggagtgctttggagtaagatcagagccccattgatcgttcctctgctaagaatcacaattgtgctgtgcttgatcatgtcggttatgctcttcattgagaggctgtacatggccattgtcattgttctgataaagctttttggacgaaaaccagataagagatacaattgggagcccatgaaagatgatgttgagttgggaaactcagcttatcccatggttctagtccaaatcccaatgtacaatgaaagagaggtttatcagctttcaataggagctgcatgtgggctatcttggccttctgataggatcatcattcaagtccttgatgattcaacagactcaactgtcaaggacatggtggagctagagtgccaaagatgggcaagcaaaggcataaacatcaagtacgagataagagacaacagaaatgggtacaaagctggggctctcaaagaaggcttgaagcgcagctacgttaaacactgcgattatgtcgccatctttgacgctgatttccaacctgagtcagattttctctgccgcaccattcccttccttgtccacaaccctgagcttgctctcgttcagactcgctggaaattcgtgaactcaaatgagtgcttgatgacaagaatgcaagaaatgtcactggattatcatttcacagttgagcaagaagtgggctcctccactcatgccttctttggattcaatgggaccgctggtgtatggagaattgctgcaatcaatgaggctggaggatggaaggacagaaccacagtggaagatatggatctggctgttcgagctagtctcaaaggctggaaatttgtgtatcttggtagcataaaggtgaagaatgaattgccaagtactttcaaggcctaccgctaccaacagcacagatggtcttgtggtccagctaaccttttcaggaaaatggtcatggaaattataagaaacaagaaagtatcactatggaagaaggtccatgtgatttacagcttcttcttcgtcaggaagatcatagcacatatcaacgcatttgtcttttactgcattgtcttaccggcaacagttttggttcctgaagttgtggtgccaaagtggggaggaatttatattccttctatcattactcttctcaatgcagttggcactccaaggtcactccacttattggtgttctggatcctatttgagaacgtcatgtcactacaccgtacgaaggctacaattatcggtctgctagaggctagtcgagtgaatgaatggattgtcactgagaaacttggagatgctctcaagactttgacagtagctgcaaaattacccaggaaacctcgaatcaggattggagaaagacttcatttgctagagcttgctgttggatgttacctcttcttctgtggcacttatgacttcgcctttgggaaaaactacttctaccttttcctttacatccaagcaatggccttctatatcattgggtttgggtatgttgggacatttgttcccaactcttagtggggctgctgcagaaatactacaaaattctgttaactgccagtcactatatgccggaatcgctctcttcttcagcaaaatagtagcaagcttgtaaaaagagagacaaacaagaaaagaaaaagggtggtctttttttttttttttttttggggtacagcataagatttcgggatgagtcgtagaatttgttctcttgtgaatattaaaaaaaagtaaggaaattaaatttacagattgttcttgttatgggagtgcaacacaaaggaaaaggcaaaaggtcaaggtaactcaagggtgctgaccccaatcagagaaaacatctttgtatggattgcttgtaattctgagatttttcagatctttttgttgttcattttgttttccattcttgtttggatttgctaaaaatgcttatcaaaggaataaactccatggaaatgggatgtgctctctctctctctctct

SEQ ID NO: 1703 - DNA, 3458 bp, Pinus pinaster
agatctgactaggtcagcatagttgagtggagtggtggttgaatctaagccaccttgccaatcgtagaaactaagctacagccgctctctgttagctaaacttggctcatcacagcagttgggcggaacctatcagagattgcgaatatttagctacaaaaggcccagagctcccctacaatgccaaagcaggttcagcactgtgtggagcagcaataagcagcagcagcattgctactgcagacagtgctgtattggttgtttgtgaaaaaatccaaatccagattggattagtacacttcaaatgccacctgctatcaagaggcattaaggtagagggtatagaatatttgagtgagagagaaaggcctaggcttgcatgtcaaacggctgcctctacattgcagaaagtgtccagatctcattgctcctgcaggtagagtggagccggagccgttttgactgatcagtattactgttgtttccatgtcccaataagaatagactgttaacgaatgaatttcaaaacccacattgccgaattcagtggggtataactgtcagggacaattcatttcttgttgtcttcattcattaacaagggactcagaggccatgggcttgtaggagcaaggggaggagaataataggaggaagaagatctctgatatccatacttatcagggctgggcaggccagatccagatctttggcaaggtatattgggctgcggtacaatttggtgcagaggatctaggtggccagcctggttttctgattcaatatggatcggttatcttctgcaaatctccttccagagtcatttccgagcaatgacatgaccgaacagcttgcattgatatggaggcagattagagcgccccttattgctccgttgctgagatttgctgttggtatttgcttgataatgtctctgatgctgtttattgagagggtgtacatggctgttgttatagtgctggtgaagctgtttgggaagaggcctgagaagagatacaaatgggagcctataagagatgacatagagcttggaaacagtgcatatccaatggttctggtgcagattcccatgtacaatgaaaaagaggtttatcagctttccattggagcagcttgtgggctttcatggccttcagacaggattatcattcaagttcttgatgattctactgacccagctatcaaggagttggtaacaatggagtgccagagatgggctagcaagggaataaacatcaaatatgagatcagagacaacaggaatggttacaaggcgggtgctctgaaagaaggaatgaaacgcagctatgtgaaggaatgtgactatgtagccatcttcgatgcagatttccagccagaaccagactacctatggcgaacgattccattcctggtgcacaatcctgaactggctcttgttcaggcccgttggaaattcgtgaattcggatgaatgcttgatgacaagaatgcaggagatgtccttggattatcatttcactgtcgaacaagaagtgggctcttctactcacgccttctttgggttcaacggtactgctggagtttggcgaatcaatgctctaaatgaagctggtggctggaaagaccgcacaactgtggaagatatggatttggctgttcgggcaagtttgaagggatggaagtttgttttcgtgggtgatcttaaagtcaagaatgaattacctagtaccttcaaagcataccgctatcagcagcaccgttggtcttgtggtccagcaaatttgtttagaaagatggtcaaggagatccttagaaacaagaaagttacaccgtggaagaagttccatgtcatttatgccttcttttttgtaaggaagattgtggctcacattgtcacattcgccttttactgtgttgtgattcctgcaactgtacttgttccggaagtccaagtacccaaatggggggctgtttacattccttcaatcatcactttactaaatgcagtaagcactcccaaatctctgcatttgcttgttttctggattttgtttgaaaatgtgatgtctctgcaccgaaccaaggcaactttcattggattattagaagctggccgtgtcaatgaatgggttgtgacagaaaagcttggagatgccatgaagcataaatctgggaagcagataaaaaaatctcgctcaagaattggagaaagactccacgtcttggaacttttcgctggcgtctatcttttcttctgtgcatcttatgatctcgcatttggaaaaaatcacttctatatctatctttatctgcaagctgcagcgttcttcgtgatgggatttggatacattggaacatttgtaccaacttcctaggaggctaggactacataaaacggaggtgccagcctgttctgtctctgtgtggcacaggcctgattggagttcaattatctatgtatagattgtatcttctcattctttttaggaggataagtacatggtatagtccccaaagggacagtgcttctcatgcatatctgttagcttatgcgagaagtcaattttagcgctatgtatgttaccaataaaatcagattcaggttgtttctctgatgagggtgtattgggtgtttcaaatagtcattcaatggtgattaatctcagatgctcctgtacttgaggcaagagtcaagatggtttagtctttagtatatttaagttaagatctgcttaactttgaagacgggatgagatgcattttatggaactgcattaccagaaaaaaatatcttgaaattagtttgttgtattctttgtaacagagggaaggatatcatgcagaggactcagctcaaaggagacacttgtaatcaaactggcctttacatccttagtttcagaggtaattgattcctgagagattctttgttaggtcagcgccattcttaagatttataaacatgctcgtggcaatgtgttacacataaattaaaggttgttgaagttgtgaggaaattgtgataggcaactgctatgaaagagagataagatagctactcggtgggaagttgagagagaagattgatggatttcttctttcgttgcccctccgtaccctttgtctatgatgataaaaatatagaaatttggatctgactatctgtttcatgtaatgtgagtggggaaacccatatatatggcctggcctgcaataaaattctttggattatcactttgcccgaaatgtgtaaatgattgtctgaaattgttgagcaattaatggaacttgaattatatttttttcctttgaaaatttcagtttcaggtttggattgaaattgaagctttgcaaatgtgttcttccaagattgtaaagtggcgtttgagtgccaatccgtggaatgaatgattatgtctgcaaatatgcagttgcagggctaatttcgcatagaga

SEQ ID NO: 1704 - DNA, 2441 bp, Populus trichocarpa
cttctctaaccatagagcagagaagggaatactagacttgatcagaatattctcttctctgaaagaaaaaaaaagggggggtcttgtaagccttttttccacattgccctataatcctcttggggtctttcttggcttccttagaaagatcactctactgtttgtgcatgatcatatatgactagtgggtctacttctgcaatggagtgacagctgcttcaacaatcaagtgactggcacaagcccatcttgccagttatctctcttccacattgcctaaacgtaactcgaaagcaaaaggaattgagtcattcttgttcttttcgcaaaggggtactcctctatataaccaagcacacacagagacacttagtgtcacatacttttgagccttccttgaaccctttattgtatcagtcctaattagtccaatggatcgtttatcatctgctagtaacatgtttcctgccggtcgggatggtgttaccggccaaattggattgatttggcaagtaataatagaaccattgatcgtgccggtcttgaaattattggtggtagtgtgtttgggcatgtcaataatgcttttcattgaaagagtgtacatgggggttgttatagtttttgtgaagttgtttgggaaaaaaccaaataagaggtacaaatgggagcctataaaggatgatattgagcttggtaactcagcttatcctatggttctggtgcaagttccaatgtacaatgaaaaggaggtttatcagttgtctattggagctgcctgtgggctttcttggccgtccgaccggatcataatccaagttcttgatgactcaacagaccctgccatcaagagcatggtggaagtagaatgtcagagatgggcaagcaaaggcatcaatataaagtatgagatcagggacaacaggaatggatacaaggcaggagctctcaaagaaggcatgaagcacagctatgttaaacaatgtgactatgtggccatatttgatgctgattttcagcctgaacctgactttctttggcgcaccataccatttctagctcacaatcctgaaattgctcttgttcaagctcgctggaaattcgtcaattctgatgagtgcttaatgacaaggatgcaagagatgtcattggattaccatttcactgtggaacaagaagtggggtctgctacctatgctttctttggattcaatggtactgctggtgtgtggagaatatcagcagtcaatgaagctggagggtggaaggctcgaacaacggtagaggacatggatttggctgtcagggctagcctcaaaggctggaagtttgtttatgttggtgacctcaaggtgaaaaatgaattgccaagcactttcaaagcatatcgatatcagcaacatagatggtcttgtgggccagcaaatctcttcaggaaaatggctatagaaatagtaaaaaacaagaaagtgtcattgtggaagaaatgttatgtgatctacagtttcttcttcgtccgcaagattgtggcacatattgtcacgtttttattctactgcgttgttttgcctgcaactgttctggttcctgaagtaactgttcctaaatggggagctgtctatattccttcagttgtaactctcctcaatgctgttggaacccctagatcactccatctgatggttttctggatcctatttgagaatgttatgtctctgcaccggacaaaggcgacattcataggtcttctggaggcaggaagagtgaatgaatgggttgtcactgaaaaattaggagatgctcttaaggccaaattacctgctaaagctaccaagaaaccgcggattaggatcggagaaagattacatttgctagaactctgtgctggagcctatctcttcttctgtggatgctatgattttgcctttggaaagaacagatattacatattcctcttcctccaatccattgccttcttcattgcaggatttggttacattggcacctttgtcccccactcttagcaagaatctttcttgtctccaagaaacaacagcattgtgattccatcagggacagtttttttttttcctttgttgcaggctattgaagtaaaggctggtcattcttttcttgttgaacataagggatgctgtattttcgatttctttttacaaaaacctttgtgatttgttgttattttcagggtacaaaataacaaggaaagagtaaattggtagatatagtagcatatacgttgtgctcccatgaatgtagacatctttgtaagggctgatgatttgaaatagaaagttggaattttgtcttgataataatattgcggatgggcaaggaatctatagttgaaataaaagattttcgcaatttatgtataccctttctcttttttatcgtttgagcaatcatccacaatgtatcac

SEQ ID NO: 1705 - DNA, 2086 bp, Musa acuminata
tttctctccctccttccctctacgttgtgtcttcctctctctcccctccctctcgccttgggggagaagagacaggaccaaggttgagagttctgtggaggaagcacaattcaaagacgagcacggcgttctacctttcgcttgctaccctcttgtttccttcctatcatcctctgctgccatgctggtttagtcctgcgccaccccggtagcttttgcaatttgagctttgtgcattccgctagttgctttgctccggagatcaagcgaggaagcagagaagagaagatggacaggctatcttcgacggccattcttccggaggcgttccagggggcgagggacgacatcacggagcagctgggggtcgtatggcagcagatcaaggcgccagtgatcgtccccctgctgcggctctccgttctcctctgcctggccatgtccgtcatgctcttcgtcgagaaagtgtacatggccgtcgtcatcgtcctcgtcaagcttttccgccgccggcccgagacgcgctacaagtgggagccgatgggggacgacgccgagcttggcaatgccgcctaccccatggtcctcgttcaaatccccatgtacaacgaaaaggaggtgtaccagctctccattggagctgcgtgcgggctctcatggccatcagaccgtatcataatccaagtgctcgacgattccacagatcccgcgatcaaggagctggtgcagatagagtgccgcaggtgggcgagcaaaggggtgaacatcaagtacgagatcagggacaacaggaacggctacaaggccggagcgctcaaggaggggatgaagcacagctacgtcaagcagtgcgactacgttgccgtcttcgacgccgacttccagccggaacccgacttcctgtggcgcaccatccccttcctcgtccacaacccccagattggcctcgtccagggccgctggaagttcgtgaattcgaatgaatgtttgatgacaaggatgcaggagatgtccttggattaccatttcactgtggagcaagaagtgggatcctccacctatgccttcttcgggttcaatgggactgctggggtttggaggatcgcagctctcaatgaagctggaggctggaaggacaggaccacagttgaggacatggatttggctgttcgagcaagcctcaggggatggaaattcatattccttggagacctcaaggttaaaagtgaactaccaagtactctcaaggcctaccgctatcagcaacatcgatggtcctgcggtccagcgaacttgttcaggaaaatggccatggatatcgctaggaacaagaatgtaactctctggacgaaagttcatgtgatctacagcttcttcttcgttcgtaagatcgtagctcacatcgtgaccttcatattctactgcgtggtgatccctgcgactgtcttggtccctgaggtggaagtgcccaactggggtttagtctatattccttccaccatcacacttctgaatgctgtcggaacaccgaggtctcttcacttgctggtgttctggatccttttcgagaacgtcatgtccttgcacagaacaaaagcaaccttgattggcctcttggaagcagggagagtgaatgaatgggtggtcactgagaagctaggggatgtcatgaagacaaaagtggctgccaaggcagcgaggaagccaagaattagaattggcgataggctgcatctactggagctcttcacaggagcctatctcttcttctgtggctgctacgacctgtctttcgggaagaaccattactacctctacctcttcctccaagcaatcaccttcttcgtcgtcggctttggttatgttggcacctttgttccacaaacttagtagcagttttttgcttggatacattgtggcggtgctgaatcttttggctggatcgcctgttactgtaggagggggtggatttagcttgaagatgaatgtgcggaagcaaacatctttagatgaattatggttattgaatttgcccaacactctctttacaatgttttatttaagaaaaaagaagggaaaaatatga

SEQ ID NO: 1706 - DNA, 2474 bp, Pinus taeda
aggtggccagcttggttttctgattcaatatggatcggttatcttctgcaaatctcctcccagagtcatttccgagcaatgacatgaccgaacagcttgcattgatatggaggcagattagagcgccccttattgctccgttgctgagatttgctgttggtatttgcttgataatgtctctgatgctgtttattgagagggtgtacatggctgttgttatagtgctggtgaagctgtttgggaagaggcctgagaagagatacaaatgggagcctataagagatgacatagagcttggaaacagtgcatatccaatggttctggtgcagattcccatgtacaatgaaaaagaggtttatcagctttccattggagcagcttgtgggctttcatggccttcagacaggattatcattcaagttcttgatgattctactgacccagctatcaaggaattggtaacaatggagtgccagagatgggctagcaagggaataaacatcaaatatgagatcagagacaacaggaatggttacaaggcgggtgctctgaaagaaggaatgaaacgcagctatgtgaaggactgtgactatgtagccatcttcgatgcagatttccagccagaaccagactacctatggcgaacggttccattcctggtgcacaaccctgaactggctcttgttcaggcccgttggaaattcgtgaattcggatgaatgcttgatgacaagaatgcaggagatgtccttggattatcatttcactgtcgaacaagaagtgggctcttctactcacgccttctttgggttcaacggaactgctggagtttggcgaatcaatgctctaaatgaagctggtggctggaaagaccgcacaactgtggaagatatggatttggctgttcgggcaagtttgaagggatggaagtttgttttcgtgggtgatcttaaagtcaagaatgaattacctagtaccttcaaagcgtaccgctatcagcagcaccgttggtcttgtggtccagcaaatttgttcagaaagatggtcatggagatccttagaaataagagagttacaccgtggaagaagttccatgtcatttatgccttcttttttgtaaggaagattgtggctcacattgtcacattcgccttttactgtgttgtgattcctgcaactgtacttgttccggaagtccaagtacccaaatggggggctgtttacattccttcaatcatcactttactaaatgcagtaagcactcccaaatctctgcatttgcttgttttctggatcttgtttgaaaatgtgatgtctctgcaccgaaccaaggcaactttcattggattattagaagctggccgtgtcaatgaatgggttgtgacagaaaagcttggagatgccatgaagcataaatctgggaagcagataaaaaaatctcgctcaagaattggagaaagactccacgtcttggaacttttcgctggcgtctatctcttcttctgtgcatcttatgatctcgcatttggaagaaatcacttctatatctatctttatctgcaagctgcagcgttctttgtgatgggatttggatatattggaacatttgtaccaacatcctaagaggctgggaccacataaaacagaggtgccagcctgttctgtttctgtgtggcacaggcctgattggagttcaattacctatgtatagattgtatcttctcattctttttagaaggataagtacatggtatagtccccaaagggacagtgcttctcatgcatatctgttagcttatgcgagaagtcaattttagcgctatgtatgttaccaataaaatcagattcaggttgtttctctgatgagggtgtattgggtgtttcaaatagtcattcaatggtgattaatctcagatgcccctgtatttgaggcaagagtcaagatggtttagtctttagtatatttaagttaagatctgcttaactttgaagacgggatgagatgccttttatggaactgcattaccagaaaaaaatatcttgaaattagtttgttatattctttgcaacagagggaaggatatcatgcagaggcctcagctcaaaggagacacttgtaatcaaactggcctttacatccttagtttcagaggtaattgattcctgagagattctttgttaggtcagcgccattcttaagatttataaacatgctcgtggcaatgtgttacacataaattaaaggttgttgaagttgtgaggaaattgtgataggcaactcttatgaaagagagataagatagctactcggtgggaagttgagagagaagattgatggatttcttctttcgttgcccctccgtaccctttgtctatgatgataaaaatatagaaatttggacctgactatctgtatgtaatgtgagtggggaaacccatatatatggcctggcctgcaataaaattctttggatt

SEQ ID NO: 1707 - DNA, 2919 bp, Podocarpus macrophillus
gggttgttgaatctagcccagcttgccattcttagaacccaagctacatggtcagttagcttcgcttgggtaatcacagcagttggccagagactatcaagggaatacagggtgtgaggcctacttaagccttggaaaactcctctgccatgaacacaagcagtctgtaagagccaagtaccagtagagctctgcagactgttgtttgtgttcttggtttgtctcttaatgtgtttattgatagctggtgtgttagactgaggtaaactcccaattaggattggcgcattgtgtggagcggtattagagcaaagggaataggtgatttggttcttggtcaacttggccaggctctgcatgtgtgacggttggcctggtctctgcattttcctccagatctccaccttcctagtggagctacttggcttggcctaacacttaacattgcagaattcaattgattcagtaggcctaaggatactgcatttgtttgtcttgcttgagtcatgggattatatacagaataagaataagatccagctcttgcagcgcagatccagacttgtgtgacattgggatatcttggtattgatattattttgtgggtgagtgacatatagtgagtatggatcagttgtccacttcagggctccttcctgagacttttcagggtgccagggatgacatgactgagcagctggcattgatatgggagcagataagagcacccattattgccccactgctgagtcttgcggttgtcttttgcttgatgatgtctgtgatgttgtttgtggagagggtgtacatgtgtgtggtgatagtgttggtgaagctgtttgggaagaggcctgagaagagatacaaatgggagcccatcaaggatgatattgagcttggcaacagtgcttatcccatggttctagtgcagattcctatgtataatgagagagaggtgtatcaactttccattggagctgcatgtggcctctcatggccctctgaccgcatcattatccaagttcttgatgattctaccgatccaactatcaaggagatggtatcaattgagtgccagagatgggctagcaagggcataaacatcaagtatgagatcagggacaacaggaatggctacaaggcaggtgctctcaaggaagggatgaaacggagctatgtcaaagagtgtgattatgtcgccatatttgatgcagatttccaaccagagccagattacctgtggagaacaattcccttcctgatgcacaatcctgaattggctttggttcaagccaggtggaaattcgtaaattctgatgagtgcttgatgacaagaatgcaagagatgtccctggattatcatttcactgtggaacaagaagtgggttcttctactcacgccttttttggtttcaatggaactgctggggtttggcgcattcatgccctaaacgaagctggtggttggaaagaccgcacaactgtggaagatatggatttggctgttcgagcaagtttgaaaggatggaagtttgtttttatcggtgatctttcagttaagaatgaactgcctagcacattcaaagcataccgctatcagcagcaccgctggtcctgtggccctgcaaatttgttcaggaagatggtcatggagattattaggaataagaaagtgacaccatggaagaaattccatgtgatctatgcattcttcttcgtaaggaaaattgttgcccacattgtcacattcaccttttactgtgttgttattccggcaactgttcttgttccagaagtaagcataccaaaatggggtgctgtttacattccgtcgataatcactctactaaatgctgtaagcactcccaggtccctgcatctgctcgttttctggattttgtttgaaaatgtgatgtctttgcatcgtactaagggaaccatcattgggttgttggaagctggccgggtcaatgaatggattgtgacagagaagcttggagatgccttgaagcataaatcagtaaaacatgttaagaaacctcggtcaagaataggagaaagactacatgttttggaagtcttgactggtgtctatcttttcttctgtgcatcctatgatcttgcatttgggaagaaccacttctacatctacctctacttgcaagctgcagcattctttgtgatgggatttggatacataggaacatttgtcccaacctcctaatattgaataagatagaatttcaccttgtttgtgttctattacattctcctgtggcagatcaagccagctttgtgttcaattacttatgtaaagattgttgtatcttctcatttttttaggttgttaagtacatggtatagatccaaaggaatagcacttcttgtgcatgatactattatttatgtgagaaatcaaatttagagctctatgtgccaaataaaatcggattcaagttcatttgtccgatggaagtataatgggtttctgaagtggttctccaaggattgtatgggtgtctcaaatggaggtggcagggttgtcaagtctgtgacagacctaagttttgttccgggtaattttcagggcagtattgagatgcatattatggatctgtattatgatgaagaagtaagaacattacaatccatattttgaaatctatgcatgcacttttgggatgacatgaacggaagggtggactctgctcaaaggttgacatctaacattactggcgttgtaataggccattgctattgtggaaatttaagaattcccaccagaacattatgtttcaagaaaattactggatatgatcaaatttgtgaagaaattgttatattgattttgaataagggatgcctctcttacattctttttgtctacgctcatcagatctagaaattgaaatgtgtaat

SEQ ID NO: 1708 - DNA, 1983 bp, Solanum phureja
cctgttttttttttttaataatggaggggttatcaagaacaaatcttgtttctgatacattttatggaacaagagatgatataacagaacaatttggtataatgtggggacaaatcaaagctccattgattgttcctcttttaaggatttcagtgtttttatgtcttgctatgtctgtaatgttgtttattgaaagagtttacatgtttgttgtcattactttattgaaagtttttggtacaaaacctgaaaaaagatacaaatgggagccattaaaagatgatgttgagcttggcaattcatcttatcctatggttcttgttcaaattccaatgtataatgaaaaagaggtttatcagctttcaattggagctgcatgtggactttcatggccttctgatcgtattatagtacaagttcttgatgattcaacagaccccattactaagaatttggtggacattgaatgccaaagatgggcaagcaaagggataaatataaaatatgaagtgagggacaataggagtggatacaaagcaggtgctttgaaagaaggattgaagcattcttatgtgaaacaatgtgattttgttgctatttttgatgctgattttcaacctgaacctgattttctatggcaaacaattccatttctagttcacaatcctgaactttcccttgttcaagctagatggaaatatgttaatgctgatgaatgtctaatgacaagaatgcaagaaatgtcattggattatcatttctctgtggagcaagaagttggctcttctacacatgcttttttcggatttaatggcactgctggtgtttggagaatcgccgcgatagatgaggctggaggttggaaggacaggacaacggttgaggatatggacctcgctgtccgtgctagtctcaagggatggaaattcttgttccttggttcagtcaaggtaaaaaacgaattaccaagtacattgaaggcctatcgttatcaacaacatcgttggtcctgtggcccagccaatctcttcaggaaaatgtgtatggagatcataagaaacaagaaagtgtctttgtggaaaaaggttcatgtgatttacagcttcttcttcgttagaaaggttgtagctcatattgttactttcgtattctatgttgtggtattacccgccactgtattagtacctgaagttgaggttccgaagtggggagctgtttacattcctgccatcattacactactcaatgctgttggaactccaaggtcactccatctgctggtattttggatccttttcgagaatgtaatgtcactgcaccgtactaaggccaccttcatcggcttgttggaggcaggacgagtgaacgaatggattgtcacagagaaattaggggacgctctgaagttgaaatcagctaccaaagcgtttaaaaaacatcgaatgaggctaggtgacaggattcatttgttagagtttgctgctggtgcatacctcttcttctgtggatgttatgacattgcatttggtactaaccactatttcctctacctcttcattcaatcattcgcctttctcatcgttggatttggttacgttggcactttcatacccaactcttagtcaacaagcatgaaactgattttatggtatgaatcttaagctttttcacccagtgctccccctcagtagcaccaaaagaagtggcgttgcgcgcctttcttgttttggggtgtttttttttttatcatttgtaaagagatgtgagtatattctttttaggtaatttcaaacatgaaagtgattcgagcccggtttgttctctttgtgtatattcccagaaagagttctgtgcttaaatgcagcatcatatacatagaagaagatatgcaacaaagattgaattttttccctttccttttacttagatgtaataaatttggtttcaaatttcacaatacagagctaatgtttacatttctct

SEQ ID NO: 1709 - DNA, 2311 bp, Arabidopsis lyrata
cacacacacacatacacaccactgtgtctcctctctctctgtttctgtttttagatctctcttctctcttcttcctttccaaaaatcatcttctccttctccacctttcattatctttcttctcttacctaaatcctttaaatacaagaaaaaaagaaaaaaagaaaaaaaaacacagaaaaaaagaaaaaaagaaattgaattctcctttctcccgacaatctgagtttttcaggcagagaagacagagattttcaccgtaaggagaaaaaaaaagggaaaaactctgtctctctgtttctgtttcgtccttcggtttgatttcttacaccacaagagacttctttaaagaatctcacattgttccctattgcttgtctcacaagaaaatcctttatacggatctagggttcttacttccgtcccctgtttttttctctctcgccggagtaagaagaaatggagctaggggattcgacgacgtcggtgattccagactcgttcatgggatacagagacgacataacaatgcaaatgtcaatggttttggatcagatacgagctccattgattgttcccgtccttaggctcggagtttacatatgtttaacaatgtcggtgatgctctttgtcgaaagggtttacatgggaatagtaatctctcttgtgaagctgtttggtcgaaaaccagacaaacgtttcaaatatgaaccaatgaaagacgacatcgagcttggaaactctgtttatcctatggttcttgttcaaatcccaatgttcaacgaacgagaggtttatcaactatctattggagctgcttgtggactctcttggccttctgatcgaatcgtcattcaagttcttgatgattccactgatccaacgatcaaagatctagtggagatggagtgtagcagatgggcaagtaaaggagtaaacatcaaatatgagatcagagataacagaaaaggatacaaagctggagctttgaaagaaggaatgaagaagagttatgtcaaaagctgcgattacgtcgcaatcttcgacgccgattttcaacctgaaccggattttctctggagaaccgtaccgtatctcctccataacccaaaacttgctcttgttcaagctcgctggaaattcgtaaattcggatgaatgtttgatgacaaggatgcaagaaatgtctttggattatcattttacggtcgaacaagaagttggttcttctacttacgctttcttcggattcaacggaactgcgggaatatggagaatatcggcactaaacgaagctggtggttggaaagatcgaacgaccgtggaagatatggatttggccgtgagagctagtctcaagggctggaaattcttgtaccttggttcgttaaaggttaaaaacgagttgccaagtacattcaaggcttataggtatcaacagcacaggtggtcatgtggtccagctaatcttttcaggaaaatggcattcgaaatcatgaccaataagaacgtgactttgtggaagaaagttcatgtgatatatagcttcttcgtggttagaaagctagtggcacacattgttaccttcatcttctactgtgtgatcttacccgctacagttcttgtaccggaagtttctgttccgaaatggggagcggtttatattccttcagtcattactctcctcaacgccgttgggacaccaaggtcactgcatcttatggtgttttggattctgttcgagaatgttatgtctcttcacagaacaaaagctaccttcatcggtttactcgaaggcggaagagttaatgagtggattgttacagagaagctgggagatgttaaggctaaatcggccaccaagactccaaagaaggttcttcgttttagattcggagatagaattcatgtgttggaactcggtgtaggaatgtatctgttatttgtgggatgttatgacgcgttttttgggaagaatcattattatctataccttttcgcgcaagcaatcgcgttcttcattgcgggattcgggcaaattgggacaattgtgcctaaccattgaagggaaaaaggagtttttgagcgacgaaatgctcgaggataaaaagatgatttcttttttttctttttttttttttttggattcgctagctatttaaattcttgttggtgtgaatagagagaattgatgatacgattgttacagaagatggtgtgtgtagtgtggaagataaggatacttatagtaaagaggaaatatactttgaagggatttttccgattccttttaaggcaaagaatttttgact

SEQ ID NO: 1710 - DNA, 2792 bp, Cephalotaxus harringtonia
actatcagtgactgcaggcattcggcgtctctacaactacttaaggctccaagttgtgcaatgcacaaagcagtctgtagagcaagcagaagcagaagcagaagcagcagcagcattgcttctgcagactctattgtttatgttaagtttgtttattgttgtgggtgtgagttatataaagtccaataaggccagttaggacaagaagtaatgcccacatggtagcaaggggcattacagcagggaatagttgatttgttcacaactgcactattcttccatttgggagattgaaggagaggttgtgcatgtgaaacgggcggctctccaaaaaagggtatggagatctccatgttcctagtgcagacatttgacttgtgcttcatgttctgcaacacccacattgcagaattcacttgtcaatagatgaaatcccactgtcaggcctaacaatagcacatttgttctctacattcggtcatgggattgtagaagaataataaggtcctaagatcctgtaatacttggttcccagatccagacttgtggcatcatatattgcatttgagagcatctattttagctgatacatctattcactcattatggatcggttgtctagttctggtctcattccagagacttttcaaggtgccagagatgacatgaccgagcagcttgcattgatatgggagcagataagaacacccattattgttccactgctgaaacttgcagttgttatctgtttggccatgtcggtgatgttgtttgtggagagggtgtacatggctgtggtgatagtgttggtgaaactttttggtaagaggcctgagaaaagatacagatgggagcccatcaaggatgatatagagcttgggaacagtgcttatcccatggttctggtgcagattcctatgtataacgagaaagaggtgtatcaactttccattggagcagcctgtggcctctcatggccttcagaccgcatcgttatccaagttctggacgattccactgatccaactatcaaggatatggtgataatggagtgccagaggtgggccagcaaaggcataaacatcaagtatgaagtcagagacaataggaatggctacaaggccggtgctctcaaggaggggatgagaaggagctatgtaaaagattgcgattttgtagctatatttgatgcagatttccaaccagaaccagactacctgtggagaacaatccctttcctgatgcaaaatcctgaattgggcttggtccaagcccgctggaaatttgtgaattcggatgaatgcttgatgacaaggatgcaagaaatgtccctggattatcatttcaccgtggagcaagaagtgggctcttctactcatgccttctttggcttcaatggaactgctggggtttggcgcatcaatgcaataaatgaagctggtgggtggaaagaccgcacaacagtggaagatatggatttggctgttcgagcaagtttgaagggatggaagtttgttttcatcggtgatctttcagtcaagaatgaattgcctagcaccttcaaagcatatcgttatcagcagcaccgctggtcttgtggccctgcaaatttgttcagaaagatggtcagggagattattagaaataagaaagtatccgcatggaagaaattccacgtaatctatgcattcttctttgtaaggaagattgttgcccaccttgtcacattcatcttttactgtgttgttattcctgcaactgttctagttccggaagtcaccataccaaaatggggtgctgtttacattccttccatcatcactcttctcaatgctgtaagcactcccaggtccctgcatctacttgttttctggatcttgtttgaaaatgtgatgtctctgcatcggacgaaggcaaccatcattgggttattggaagctggccgagtcaatgagtgggttgtgacagagaagttgggagatgccttgaagcataaatcaggaaaacagattaagaaatctcgttcaagaataggagaaagactgcacgtcgtggaactcttgactggtgtctatcttttcttctgtgcatcttatgatcttgcatttgggaagaaccacttcttcatctatctctacctgcaagctgcggcattctttgtgatgggatttggatatattggaacatttgtacccacctcctagtaccaaataagatggacatcaacttatttgttttctattacattatctgtggcagaccaagccagatgtgagttcaattacgtatgtatagattgtatcttctcattctttttagatggataagtacacggtatagttccaaaagagatagcacttctcatgcatagatactgttacttatgcgagaagtcatgtttagagctatgtatgtcccaataaaatcggattcaagttcatttgtccgatgatagtatattgggtgtctcaaatggaggtggctgggggaagagtaaatgtcgtaaagcctgtaacatgcctaagttaagatctgcttaactttcaggacagtgtgagatgcatttatggatctgtattatcagacaaagcattaacatccataacttgaaatcagcacatgatattttttcgattagaaggaatggcgtgctatgagcaggggatggacgttgctcaaggttgacacccaaaaataagggggtttttaggattaaatcagagcttattgattccttgaagattttttgataggtcagtgctatttttgatattttcaagaatgcacacaag

SEQ ID NO: 1711 - DNA, 2891 bp, Pseudotsuga menziesii
gagggacagaagaaggttttgggttgcatgtcaaacggctggctctacattgcaggaagtgtccagatctaattgcttctgcagtggagtggagccgttttgactgatcaggattattgttttctccatgcccaaataagaaaaggcactgccagtgaatgaatttcaaaacccacattgccaaattcagtggggtataactgtctggcctaacaatatatgttttgttgtttacgttcattaacaagggactcagaggccatgggcttgtaggaggaaagggtgaagaagatctctgatattcatactcatcagacctaggcagcccagatccagacttgtggcaagatatattgggtattggaatcttttgtttcagaggatcgaggttgctagcttggttttctgattcaatatggatcggttatcttctggaaatcttcttccagagtcatttcagggcaatgacatgacagaacagcttgcattgatatgggggcagataagggcgccccttattgctccgttgctgagatttgctattgctatttgcttgataatgtctctgatgctgtttattgagagggtgtacatggctgttgttatagtgttggtgaagctgtttgggaagaggcccgagaagagatataaatgggagcctataagagatgatatagagcttgggaacagtgcatacccaatggttctagtgcagattcccatgtataatgaaagagaggtttaccagctttccattggagcagcatgtgggctctcgtggccttcagacaggatcatcattcaagttcttgatgattccactgacccaactatcaaggagatggtaacaatggagtgccagagatgggctagcaagggaataaacatcaaatatgaaatcagagacaacagaaatggttacaaggcgggtgctctgaaagaagggatgaaacgcagctatgtgaaggaatgtgactacgtagccattttcgatgcagatttccagccagaacctgactacctgtggcgaacgattccattcctgatgcataatcctgaactggctcttgttcaggcccgttggaaattcgtgaattcggatgaatgcttgatgacaagaatgcaggaaatgtccttggattatcatttcactgtggaacaagaagtgggatcttctacccacgccttctttgggttcaatggaactgctggagtttggcgaatcaatgctctaaatgaagctggtggctggaaagaccgcacgactgtggaagacatggatttggctgttcgggcaagtttgaagggatggaagtttgttttcgtgggtgatctttctgtcaagaatgaattacctagtacattcaaagcataccgctatcagcagcaccgttggtcttgtggtccagcaaatttgtttagaaagatgatcatggagatccttagaaataagaaagttacagcgtggaagaagttccatgtcatttatgccttcttctttgtaaggaagattgtggctcaccttgtcacattcaccttttactgtgttgtgattcctgcaactgtacttgttccggaagtccaagtacccaaatggggggctgtttacattccttcaatcatcactttattaaatgcagtaagcactcccaaatctctgcatttgcttgttttctggatcttgtttgaaaatgtgatgtctctgcaccgaaccaaggcaactatcattggattgttagaagctggccgtgtcaatgaatgggttgtgacagagaagcttggagatgccatgaagcataaatctgggaagcagactaaaaaatctcgctcaagaattggagaaagactccacgtcttggaactgtttgctggtgtctatctcttcttctgtgcatcctatgatcttgcatttggaaaaaatcacttctatatctatctttatctgcaagctgcagcgttcttcgtcatgggatttggatatattggaacatttgtaccaacatcctaggaggctaggactacataaaacagaggtgccagcctgttctgtttctctgtggcagatgaagcctgatttgagttcaatttacctatgtatagattgtatcttctcattctttttaggaggataagtacatggtatagtccccaaagggacattacttctcatgcatatctgttagcttatgcgagaagtcaatctatgtatgttaccaataaaatcagcttcaggttgtttctctgattgagggtgtattgggtgtttcaaatggtcattcaatgatgagtatctcagatgggagttattgaggggagagtcaagattgtttagtcttaagtagaattaagttaagatcttcttatctttgaagacagggcgacgtgcattttgtggaactgcattatcagaaaaacaacagaggcattcatatcctgaaatcagtttgttgtattcttcgcaacagagggaaggacatcatgggggactcagctcaaaggagacacttgtaatcaagctggccttttacattcttagtttcagatgtaattgattcctgagagattctttgttaggtcagcgccattcttaagatttacaaacatgctcgtggcaatatgttacacataaattaaagaatattattgaagttgtgaggaaattgtgataggcagctcttatggaagagagataaggtagctagctactctgtgatgggaagttgtgagggatgattgagagatttcatctttctttgcccctccattccctttgtctatgatgatagagatgtagaaagttgaatctggttcatgtaatgttagtggtgaaacccacacatatggcctggcctgcaataaaattatttggattatcactttgtacgagatgt

SEQ ID NO: 1712 - DNA, 2979 bp, Abies balsamea
agcatgagttgagtgaagcggtggttgaatctaggccaccttgccaatcttagaacctaagctacgcccactttgtgttagcttaacttggttcatcacatcagttgggcagaagctatcagagattgcaaggatccagctacaaaagggcttgagttccctacaatgccaaatcaggttcagcactgtgtggagcagcaataagcagtagcatcagcattgctactgcagacagtgttgtgtttgttgcatgtggtaaaatccaaatcctgattggattagtacacttaaaatgtcacatgccatcaggaggcattaaggcagggaacagtctatttgagagagagaaggcggcgttgtgcttgcatgtgaaacggctcgctctacattgcagaaagtgtccagatctcgttgctcctgcactggagtggagtggagtggagccattttgactgatcgggattattgttgtctccgtgcccaactgagaataggcagtgcgatcaaatgaatttcaacacccacattgccacattcagtggggtataactgtcaggcctaacgatacatttctctgtaatcattcattaacaagggactcagaggccatgggcttgtaggaagggaggagaataataggaggaagaagatatctgatatctatattcatcaaggctaggcagcccagatccagatttgcggcgagatattttgggttttggtacattttgtttcagaggatctgggtggctagcttggtttcctgattcaatatggatcggttatcttctgcaaatcttcttccagagtcatttcagagcaatgacatgaccgaacagcttgcattgatatggaggcagataagggcgccccttattgctccgttgctgagatttgctattgttatttgcttgatgatgtctgtgatgctgtttcttgagagggtgtacatggctattgttatagtgttggtgaagctgtttgggaagaggcctgagaagagatacagatgggagcctattagggatgacatagagcttggaaacagtgcgtatccaatggttctggtgcagattcctatgtataatgaaaaagaggtgtaccagctttccattggagcagcatgtgggctgtcatggccttcagacaggatcatcattcaagttcttgatgattctactgacccaactatcaaggagttggtaacaatggagtgccagagatgggctagcaaggggataaacatcaaatatgagatcagagacaacaggaatggttacaaggcgggtgctctgaaagaaggaatgaaacgcagctatgtgaaggactgtgactatgtagccatcttcgatgcagatttccagccagaaccagactacctgtggcgaacgattccattcctggtgcacaaccctgaactggctcttgttcaggcccgttggaaattcgtgaattccgatgaatgcttgatgacaagaatgcaggagatgtccttggattatcatttcactgtagaacaagaagtgggctcttctacctacgccttctttgggttcaatggaactgctggagtttggcgaatcaatgctctaaatgaagctggtggttggaaagatcgcacaactgtggaagacatggatttggctgttcgggcaagtttgaagggatggaaatttgttttcgtgggtgatctttctgtcaagaatgaattacctagtacattcaaagcataccgctatcagcagcaccgttggtcttgtggtccagcaaatttatttcgaaagatggtcatggagatccttagaaataagaaagttacagcgtggaagaagttccatgtgatttatgccttcttctttgtaaggaagattgtggctcaccttgtcacattcaccttttactgtgttgtgattcctgcaactgtacttgttccggaagttcaagtacccaaatggggggctgtttacattccttcaatcatcactctactgaatgcagtaagcactcccaaatctctgcatttgcttgttttctggatcttgtttgaaaatgtgatgtctctgcaccgaaccaaggcaactatcattggattattagaagctggccgtgtcaatgaatgggttgtgacagaaaagcttggagatgtcttgaagcataaatctgggaagcagataaaaaaatctcgttcaagaattggagaaagactccacgtcttggaactcttggctggcatctatctcttcttctgtgcatcttatgatcttgcatttggaaagaatcacttctatatctatctttatctgcaagctgcggcgttctttgtgatgggatttggatatattggaacatttgtaccaacctcctaggaggctaggactacataaaaagagtgtcagcctgtgctgattctctgtggcagatcaagcctgatttgagttcaatttcctatgtatagattgtatcttctcattctttttaggaggataagtacatggtatagtccccaaagggacagtacttctcatgcgtatctgttagcttatgcgagaagtcaatgttagagctatgtatgctaccaataaaatcagatacagtttgtttctctgatgaaggtgtattgggtgtttcaaatggttgtataaatagtaatctcaaatgggagtatttgagaagagtcaagatggtttagtcctgactcttaagtagaattaagttaagatctgcttaactttgaagaggggatgaagaggggatgagatgcattttatggaactgtattatcagaaaaaggcagaagcattcatatcttgaaatcagtttgttgtattcttcgcaacagagggaaggacatcattgaggacactcagctcaaaggagatacttgtaatcaggctgccctttacattcttagtttcagaggtgattgattcctgagagattctttgttaggtcagtgccattcttaagatttacaaacat

SEQ ID NO: 1713 - DNA, 2490 bp, Allium cepa
agttgctcttctattttatttcttcatagtttcgattttggtttctttttaccctcacgcattgtgcacgtatctgtattttgcattcaaaacgccaataataatcctccttttcttctccattttcattatttccgatttattttttgggtatttttgctgacaatccagctcaacaccattttccttgcttaattctacagcaaaaccccatattgtaaaagaaaatttcaaaaaggtggggaaaaataaaagaaatcgatgataaagatttctgcttttttgtcaaggaagcaagctatgctataaatttccgaaaaagaaatattactttctacaaaacccattatccaatccattttttgttactagaataacagtgatcaagaaatggagagactttcatcaacagcattgcttcctgaatcatttcaaggagcaagagacgatgttacggagcaattcggattgatttggcatcaaattaaagctccattaatcgttcctcttttgaggttattggtttcgttatgtttgataatgtcagcaatgttgtttgttgaaaaagtttacatggcaatagtgattgtgcttgtcaagatttttggtaaaaagcctgaaaaagcatacaaatgggaacctatgaaagatgatttggagatgggtgcttctgctaattatccaactgtgcttattcaaattcccatgtacaatgaaaaagaggtttatcaactgtcaattggagctgcttgtggactttcatggccctctgatcggatcataattcaagtgcttgatgattctactgatcctgccattaaggatatggtggagatggaatgcaagagatgggaaagcaaaggaatcaacataaaatacgagatccgagacaatagaaaaggttacaaagcaggagcccttaaggaaggaatgaagcataactacgttaaacagtgcgattatgttgcaattttcgatgctgacttccaacctgaacctgacttcttatggcgcaccgttccatttcttgtccacaaccctcaagttggtcttgttcaggctcgttggaaatttgtgaatgcggatgagtgtctgatgacgagaatgcaagagatgtcgctagattatcatttcactgttgaacaagaagttggatcagccacctatgcattcttcggattcaatgggactgcgggagtatggagaattgcagctttgaatgaagcaggaggatggaaggatcgaacaacagtcgaggacatggatttggctgttcgtgcttcacttcgaggatggaaattcgtattccttggagatgtcaaggtcaaaaatgaacttccaagtacactcaaggcataccgctaccaacaacacagatggtcttgtgggcctgcgaacttgtttcgaaagatggtgatggagattgcaagaaacaagaaagtgactctactgaagaaaattcacgtaatatacaatttcttctttgttcgcaaaatcgtggctcacatagtgacgtttgtgttctactgcatggttatccctgccactgtactggttcctgaagttgaaatacccaaatggggtgcagtttacatcccttccattatcaccctcctcaatgctgtcggtactcccagatcgcttcacttgatggtgttctggatcctcttcgagaatgtgatgtctctacacagaacaaaggcgacgttcataggattgttagaggcaggaagagtgaatgaatgggtagtgacagagaagctaggggacgctttgaagaataaagcaaacgcgaacaaagggttcaagaggccacgtatgaggttaggggacaggttgcatgtattggagcttggcgtaggggcgtacctcttcttttgtgggtgctacgatatcgcctttgggaagaatcattacttcatttacctttatgttcaggccattgctttcttcattgtcgggttcggctatgttgggacctttgtccctgggtcgtaaaagcattagttttgtttggtgtatttagacgatatgatacaacttagtgtgtgctacaataagtatatgtgatcaatgttgtgcaactactactgtgcatacttgtgacatgaagtaaacgttgtcgcatttttagagatatgttgttgtaaaactgggagcactagggaaagggaagttcgtacatttctcccgaaatgaagctgaagaagcacggaaacagtagcaggagagcacatatgatgctgtcaaaaaacagtttacaacttgccatgcataaccaaccgcattaaactggagatcagtcaatcctcctgaaactgcagagattatcattaagaataaagcagcccacacttgattgccatgttgcttattgaagaggtacgtctcgcctatagcagttatgacatttgtgacgtttttaagaactgtaaccatggcaacattaatgtacttcaagctgaacatgctcgtaataagcattccaac

SEQ ID NO: 1714 - DNA, 2182 bp, Allium cepa
cgcattgtgcacgtatctgtattttgcattcaaaacgtcaataataatcctccttttcttctccattttcattatttccgatttattttttgggtatttttgctgacaatccagctcaacaccattttccttgcttaattctacagcaaaaccccatattgtaaaagaaaatttcgaaaaggtggggaaaaacaaaagaaattgatgataaagattgctgcttttttgtcaaggaagcaagctatgctataaatctccaaaaaagaaatattactttctgcagaacccattatccaatccattttttgttactagaataacagtgatcaagaaatggagagactttcatcaacagcattgcttcctgaatcatttcaaggagcaagagacgatgttacggagcaattcggattgatttggcatcaaattaaagctccattaatcgttcctcttttgaggttattggtttcgttatgtttgataatgtcagcaatgttgtttgttgaaaaagtttacatggcaatagtgattgtgcttgtcaagatttttggtaaaaagcctgaaaaagcatacaaatgggaacctatgaaagatgatttggagatgggtgcttctgctaattatccaactgtgcttattcaaattcccatgtacaatgaaaaagaggtttatcaactgtcaattggagctgcttgtggactttcatggccctctgatcggatcataattcaagtgcttgatgattctactgatcctgccattaaggatatggtggagatggaatgcaagagatgggaaagcaaaggaatcaacataaaatacgagatccgagacaatagaaaaggttacaaagcaggagcccttaaggaaggaatgaagcataactacgttaaacagtgcgattatgttgcaattttcgatgctgacttccaacctgaacctgacttcttatggcgcaccgttccatttcttgtccacaaccctcaagttggtcttgttcaggctcgttggaaatttgtgaatgcggatgagtgtctgatgacgagaatgcaagagatgtcgctagattatcatttcactgttgaacaagaagttggatcagccacctatgcattcttcggattcaatgggactgcgggagtatggagaattgcagctttgaatgaagcaggaggatggaaggatcgaacaacagtcgaggacatggatttggctgttcgtgcttcacttcgaggatggaaattcgtattccttggagatgtcaaggtcaaaaatgaacttccaagtacactcaaggcataccgctaccaacaacacagatggtcttgtgggcctgcgaacttgtttcgaaagatggtgatggagattgcaagaaacaagaaagtgactctactgaagaaaattcacgtaatatacaatttcttctttgttcgcaaaatcgtggctcacatagtgacgtttgtgttctactgcatggttatccctgccactgtactggttcctgaagttgaaatacccaaatggggtgcagtttacatcccttccattatcaccctcctcaatgctgtcggtactcccagatcgcttcacttgatggtgttctggatcctcttcgagaatgtgatgtctctacacagaacaaaggcgacgttcataggattgttagaggcaggaagagtgaatgaatgggtagtgacagagaagctaggggacgctttgaagaataaagcaaacgcgaacaaagggttcaagaggccacgtatgaggttaggggacaggttgcatgtattggagcttggcgtaggggcgtacctcttcttttgtgggtgctacgatatcgcctttgggaagaatcattacttcatttacctttatgttcaggccattgctttcttcattgtcgggttcggctatgttgggacctttgtccctgggtcgtaaaagcattagttttgtttggtgtatttagatgatatgatacaacttagtgtgtgctacaataagtatgtgtgatcaatgttgtgcaactactactgtgcatacttgtgacatgaagtaaacgttgtcgcatttttagagatatgttgttgtaaaactgggagcactagggaaacggaagttcgtacatttctcccgaaatgaagctgaagaagcacggaaacagtagcaggagagcacagtt

SEQ ID NO: 1715 - DNA, 2151 bp, Glycine max
ggccatcagagagagagggagaaaagacagagagagaagacagagcagcatcctcagagaggccattgctctctcttacaaaacaacaaagaacattctctctctctccctccctccctctcttgctcttcatcattctctctttttttttttttttttttttatttcaaccctttatttgctttggctctctcataataataacttgatcagtgttctccccttggaagaaaaaaaaagtggcatgcaattagcaaactaacactactcttccctcgtcaattttttgatctctcattaatttcctcagtgttttctaagatccagagaggagcaagatggaatcatttcaaggttcaagggatgacatttcctaccaaatgggtttgatttggagccaagtgaaggagccagtgatcgtgccaatgctgagggtgtcagtgtttctgtgcttggccatgtcgttgatgatgctggtcgagagggtgtacatgggcattgtcatttgcttggtgaagctgtttggtcgaagacccgagaagcgttacaagtgggagcctatgaaggacgatgttgagttgggaaactctagttatcccatggtcttggtccaagtcccaatgtacaacgaaagagaggtttatcaactatcaattggtgcagcttgtggtctttcttggccttcagacagaatcatcatacaagttcttgatgattctactaacccaacaatcaaggagctggtgcaaatggaatgtagtagatgggcgagcaaaggggtgaacataaagtacgaggtgagggacaacagagacgggtacaaagcaggggctctgaaagaaggcatgaaacggaactacgtgaagcaatgtgactatgttgccatctttgacgcggattttcaaccggaccctgatttcctctggcgaactgtcccattccttgtcaacaaccctgaacttgctcttgttcaggcacgttggaagtttgtgaatgccaatgaatgtttgatgaccaggatgcaagagatgtcactggattaccatttcactgtggaacaagaagtggggtcttgcacttatgccttctttggcttcaacggaactgctggtgtatggagaatttcggcgctgtatgagtctggagggtggaatcataggaccacagtggaagatatggacctggctgtgcgagccagtctcagaggatggaaattcttgtacctgcccaatttgaaggttaaaaacgaattaccaagtactttgaatgcctaccgtttccaacagcacaggtggtcttgtggaccagccaatcttttcatgaaaatgttcatggagattatgagaaacaggaaagtgtccttgtataagaagatatatgttatttacagcttcttctttgtccggaaggtcgtggcccacatcaacacttttatgttctattgcattgtgttacccgctacagttgtggtgcctgaggtggttgtccccaagtggggtgctgtttacatcccttccatcatcacactcctaaatgctgttggaactccaaggtcactccacttgctggtcttctggattctctttgagaataccatgtctctgcatcgaacaaaggcaacaattattggtctgctagagggtagtcgagcgaatgaatggattgtcactcaaaagggtaaaccacccaaaagtcggttcaggataaggattcatcatatgttggaacttcttgttggattctacctcttcttctgtggctgctatgatattatgttcgggaaaaaccgctactacatattcctatacattcaatcaattgctttcttcatcatggcctttggatatgttggcattttcgatcccaactcctagaggacttgacaacacttcattcagatatctacatattgtaatagtgttcacagtataataatctgtgacattaaattaaagcttgtgttaatataaattaatgggtggtcattcttcatggttctgcatattcagagtcggtggctcgaaacagtttttttttttttttttttttgtgaatactcaacaaagatacataaggaaattacagaacttattctcttggaaatgaagcatacagaaaatgaatacagcattctacaggcatcgatcttcc

SEQ ID NO: 1716 - DNA, 2221 bp, Glycine max
cagagcagcaacctcagagaggccgttgctctctcttacaaaacaaagaacattctctctctctcttgctcttcatcattctctctctctctctctcttttacctttttttatttcaaccctttatttgctttggctctctcataataataacttacatgatcagtgttctgctcttggaagaaaaaaaaaaaagtggcatgcaattaacaaactagcaccaccaaaaacaccactcttccctcgtcaattttctgctctctcattaatttcctcagtgttctaagatccagagaggagcaagatggaatcgttccaaggtgacagggatgacatttcctaccaaatgggtttgatttggagccaagtgaaggagccagtgatcgtgccaatgctgagagttgcagtgtttctgtgcttggccatgtcgttgatgatgctggtcgagagggtgtacatgggcattgtcatttgcttggtgaagctgtttagtcgaagacccgagaagcgttacaagtgggagcctatgaaggacgatgttgagttgggaaactctagctatcccatggttttggtccaagtcccaatgtacaacgaaagagaggtttatcagctatcaatcggtgctgcttgtggcctttcttggccttcagacagaatcatcatacaagttcttgatgattctactaacccaacaatcaaggagctggtgcaaatggaatgtagtagatgggcgagcaaaggggtgaacataaagtacgaggtgagggacaacagagacgggtacaaagcaggggctctgaaagaaggcatgaaacgcagctacgtgaagcaatgtgactatgttgccatctttgacgccgattttcaaccggagcctgatttcctctggcgaactgtcccattccttgtcaacaaccctgaacttggtctcgttcaggcacgctggaagtttgtgaatgccaatgaatgtttgatgaccaggatgcaagagatgtcactggattaccatttcactgtggaacaagaagtggggtcttgcacttacgccttctttggcttcaacggaactgctggtgtatggagaatttcggcgttgtatgagtctggagggtggaatcataggaccacagtggaagatatggacctggctgtccgagccagtctcagaggatggaaattcttgtacctacccaatttgaaggttaaaaacgaattgccaagtactttgaacgcctaccgcttccaacagcacaggtggtcttgtggaccagccaatcttttcatgaaaatgttcatggagattatgagaaacaggaaggtgtccttgtataagaagatatatgtgatttacagcttcttctttgtccggaaggtcgtggcccacctcaacacttttatgttctattgtattgtgttacctgctactgttgtggtgcctgaggtggtggtccccaagtggggtgctgtgtacatcccttccatcatcacactcctaaatgctgttggaactccaaggtcactccacttgctggtcttctggattctctttgagaataccatgtctctgcatcgaacaaaggcaacgattattggtctactagagggtagtcgagcgaatgaatggattgtcactcaaaagggtaaaccacccaagagtcggtttaggataaggattcatcacatgttggaacttcttgttggattctacctcttcttctgtggctgctatgatattatgttcgggaaaaaccgctactacatattcctatacatccaatcaattgctttcttcatcatggcctttggatatgttggtattttcgatcccaacacctagaggacttgacaacacttcattcagatatctacatattgtaatagtgttcacagtataatctgtgacattaatttaaagcttgtgttagtataaatgaatgggtggtcattgttcatggttctgcatattcagagtcggtggctcgaaacagttttttttgtgaatattcaacagagatacataaggaaattacagaagttattatcttggaaatgaagcatacagaaaatgaatacagcattctacaggcattaatcttccctgggcaaacatctttgattggacacatggtttataagattttgtagttctttttttttctttttaattttattgatatttccttcttttgcctttctttacttgaatttgtttgaagaaa

SEQ ID NO: 1717 - DNA, 1648 bp, Cucumis sativus
tttttccggataaaaaaatggccgagaggatttcatcggaagctcttctccctacagagacggcatttgaaggaacaatcaacgacatgtcgttccaagtaatttcattgccttgggatgcgatcagagctccccttgtggttcccctgctccgactctcggttttcctttgcttgataatgtcgttaatgctgttcgtggaaagggtttatatggggattgtcatttcttttgtcaaactctttggaagaaaaccagagaagcgtttcaaatgggagcccatgaaagacgatatcgagcttggtaactctgtttatcctatggttttaattcaaatcccaatgtacaacgaaaaggaggtgtatcaactgtcgattggggctgcatgtggactctcatggccgtcggatcgaatcatcattcaagttcttgacgattcaacagacccaatgatcaaggatttagtggaaatggaatgccaaagatgggccagcaaaggaataaacataaagtacgaaataagagacaatagaaatggatacaaggctggggctctcaaggaaggcttaaaaagaagctatgtgaagcaatgtgattttgttgctattttcgatgccgattttcaaccggaacccgattttctttggcgaacagttccttttcttcttcataaccccaatattgctcttgttcaagctcgctggaaatttgtgaatgcaaatgagtgctttttgacaaggatgcaagaaatgtcattggattatcatttcaccgtggagcaagaagtgggctcgtccacttatgccttctttggcttcaatgggacggcaggtgtgtggaggattgcggcactgaacgaggctggtgggtggaaagaccgcacaacagtcgaagatatggacttggccgtacgcgccagtcttaaaggctggaaattcttgtatcttggagaccttaaggtgaagaatgaattgcccagctcattgaaagcctaccgctaccaacaacacagatggtcatgcgggcctgccaatttattaagaaagatgattatggaaatcatcactaacaagaaagtaacagcatggaagaaagtgcatgtaatttacagtttcttctttgtgagaaaagtggtagcacatataaacaccttcgttttttactgcattgtactaccggccaccgtattggtaccggaagttgaggttcccaaatggggatctgtttatattccttccatcattacccttctcaatgctgttggcactccaaggtcattacatttattggtgtattggattctgtttgagaatgtaatggcaatgcatagaacaaagggcacaatcattgggttgttggaggcaagcagagtaaacgaatggattgtaactgagaaattaggcgatgcctccaagcctaaacttgctgctaaaactcctaaaaagccacgattttggattggggaaagggttctgatgtgggagcttggagtgggagcatatttgttcatctgcggcatttacgacattttctttggcaaaaaccaatacttcattttcctcttccttcaagccatagccttctgcatcgtcggatttggattcgttggcacccatgtttcttctttttgatcggaatccgccaccgc

SEQ ID NO: 1718 - DNA, 1746 bp, Brassica juncea
tgggatacagagacgacatcacaatgcaaatgtcaatgatcttggaccagattcgagctccactgattgtcccggtcctcaggctcgcagtttatatctgtctaacgatgtcggtgatgctatttgtggaaagggtttacatgggaatagtaatctctcttgtgaaactctttggtcggaagccagagaaacgtttcaaatgggaaccgatgaaagacgacattgagcttggaaactctgtttatcctatggttcttgttcaaatccctatgtacaacgaacgagaggtctatcagctgtctattggagctgcttgtgggctctcatggccgtctgatcgaatcatcattcaagttcttgatgattccactgacccaacgatcaaagatctagtggagatggagtgtagtagatgggcgagtaaaggagtgaacataaagtatgagatcagagacaacagaaacgggtacaaagctggagctttgaaagaaggtatgaagaagagttacgtcaaaagctgcgattacgtggcgatcttcgacgccgattttcagcctgaaccggattatctctggaaaaccgtaccgttcctcctccataaccctaagcttgctttagttcaagctcgctggaaattcgtaaattcggatgaatgtttgatgacaagaatgcaagaaatgtctttggattatcattttacggtcgaacaagaagttggttcttctacttatgccttcttcggtttcaacgggactgcggggatatggagaatatcggcattaaacgaagctggtggttggaaagatagaacgaccgtagaagatatggatttggccgttcgagctagtctcaagggttggaaatttttgtaccttggttctttgaaggttaaaaacgagttgccaagtacattcaaggcgtataggtatcaacagcacaggtggtcatgtggtccagcaaatcttttcaggaaaatggcatttgaaatcatgaccaacaagaacgtgacattatggaagaaagttcatgtgatatatagcttcttcgtggtgagaaagatcgtggcacacattgttaccttcattttctattgtgtgatcttaccggctacggttcttgtacctgaagttattgtacctaaatggggagcggtttacattccgtccatcattactctcctcaacgccgtcggtacacctaggtcactccatctcatggtattttggattttgttcgagaatgtgatgtctcttcaccgaacaaaagctactttcatcggtttactcgaaggaggaagagttaacgagtggattgtcaccgagaagcttggagatcttaaggctaaatcagcaaccaaggctccaaagaagcttcgttttagatttggagatagaatccatgtgttggaactcggcgtaggaatgtatttgttctctgtgggatgttatgacgcgttatttgggaagaatcattattatctataccttttcgcgcaagcaatcgccttcttcatcgctggatgtgggcagattgggacagtggtgcctaactattgaatggaaaatggatttatcgagcgacaaacgtactgctcgagaataagatgatgattttatattttttcttggctactctttaatttcttgctggtgtgaatagagagaattgatgatacgattgttacagaagatggtgtgtgtagttgtggaagatatggatacttatagtaaagaagaatatatatat

SEQ ID NO: 1719 - DNA, 2493 bp, Musa acuminata
tctccctcctctgcatcctgtcctttttcttgccgactaccgtcacattactaggggaggaggaaaagagacgtgagcagggctaagcgcactgtgaaggacgcccaattccgacaatataagaccagcggcgtggttcaccttcggcttaccgctctcgatctctcgctgtcgtcctggttcccgtggatctaactaggaggagaagggctctgctcttgtttctcttcctctgttatttccaagtccgtttcgaagtagtgctgcgccaagcaccgacagtccgcatttcctctgttctttctttccgtctctgctctccaccgctttgtaggagagcgaaggaaagaagagaagtagaaaggaatggataggctttcgtcgacggccattctcccggaggcgttccaggggacgagggacgacattacgcagcagatggggatcgtgtgggagcagatcaggacgccggtggtcgtccccctgctccggctctccgtgttcttgtgcctggtcatgtccgtcatgctcttcgtggagaaggtgtacatggccgtcgtcatcgtcctcgtcaagctcttccggtggcggcccgagacgcgctacaaatgggagcccatgggggacgatgccgagctcggcaatgccggttaccccatggtcctcatccaaatccccatgtacaacgaaaaagaggtctaccagctctccattggagctgcatgcggtctttcatggccatcggatcgtatcataatccaagtgctcgacgactccacagatccggcaatcaaggaactggtccagatagagtgccagcggtgggcgagcaaaggggtgaacatcaaatacgagatcagggacaacaggaacggctacaaggccggggcgctcaaggaggggatgaagcacagctacgtgaagcgctgcgactacgtggccatcttcgacgccgacttccagcccgagcccgacttcctctggcgcaccatccccttcctcgagcacaacccccggatcggcctcgtccaaggacgctggaaatttgtgaactcgaatgactgtttgatgacgaggatgcaggagatgtctctggattaccatttcactgtggagcaggaagtgggttcctccacctacgccttcttcggcttcaacgggactgccggggtgtggcggattaacgctctcaatgaagccggaggttggaaggaccgcaccacggtagaagacatggatttggctgttcgagcgagcctcaagggctggaaattcatattccttggagatctcagagttaaaagtgagctgccgagtactcttacggcctaccgctatcagcaacatagatggtcttgcggaccagcaaacttgtttaggaaaatggtgctggagattgccaagaacaagaaagtaacactgtggacgaaagttcatgtgatctacagcttcttcttcgttcggaagatcgtcgctcacatcgtgaccttcatattttactgcgtcgtgatccctgcaactgttttggtccccgaagtacaagtaccaaagtggggtttagtctacattccctccataataacacttctgaatgctgtcggaacaccgaggtctcttcacttgctagtgttctggatccttttcgagaacgtcatgtctctccacagaacaaaagccaccttcatcggcctcttggaagcagggagagtgaatgaatgggtggtcactgagaagctgggggatggcatgaagaccaaagcgggtgccaaagcagctaagataccaagaatcaggatcggtgagaggttacatctgttggagctcttgactggagcttacctcgtcttctgtgggtgctatgatttggcctttgggaagaactattactacctctacctcttcttccaagcagttgctttcttcatcgttgggtttggttacgttggcaccttcgttccacatccttaatggtcatagtttgctataccagcgaacaccttgcggtatacattgtggcacagatgtatcttttacctggattgcatagataagcttttgagcagccatggaggtcaataaataaacctcaattcattagccatgcaaggcagatttcagcctgataggatccccccgtgtgcatattatgttgagcaatataagtatcatggtctacacaaatctgatagataggaatgattcagtctccccacaacagctgcgactgcagtagtagtgagtgaatttatcatgtctggagtcgaacaccggtagaagtattatgatcattggacaagccgacaatcttttgttgcatgtgttatatccagaagaagaagaagaagaagaagaagaagaagaagaagaagaagaagaagaaacaaaattgtagccacaatttgttaggtttcaaatactgaagtctttttttgcggtcatcatgatatgcagacactaaagtcattcagtttcttgcaagatctaagttctttg

SEQ ID NO: 1720 - DNA, 2046 bp, Populus trichocarpa
ccaatggatcgtgtatcatctgctagtaacattttccctactggtcgcgatgatattacaggccagtttggattgatttggcaagtactgaaagaaccattgatcgtgccggccttgaaactgttggttgtagtgtgcttgggcatgtcaataatgcttttcattgaacgagtgtatatgggaattgttatagtttttgtgaagttgtttggaaaaaaaccaaataagatgtacaaatgggagcctatgaaggatgatattgaggttggtaattcagcttatcctatggttctagtgcagattccaatgtacaacgaaaaagaggtttatcagttgtccattggagctgcctgtgggctttcatggccgtctgaccggatcataatccaagttcttgatgactcaactgaccctgccattaagagcttggtggaactagaatgtcagagatgggcaagcaaaggcattaacataaagtatgagattagggacaacaggaaaggatacaaggcaggagctcttaaagaaggcatgaagcacagctatgttaaacaatgtgattatgtggccatatttgatgctgatttccagcctgaacctaactatctttggcgcaccataccatttctggttcacaatcctgaaattgctcttgttcaagctcgctggaaatttgtcaactctgatgagtgcttaatgacaaggatgcaagagatgtcattggattaccatttcactgtggaacaagaagtggggtctgcaacctatgctttctttggcttcaatggtactgctggtgtgtggagaatttcagcagtcaatgaagctggaggttggaaggatcgaacaacggtggaggacatggatttggcagtaagagctagtctgaaaggctggaagtttgtttatgttggtgacctcaaggtgaaaaatgaattaccaagtactttcaaagcttaccgatatcagcaacacagatggtcttgtgggcctgcaaatctctttaagaaaatggcaatcgaaataatcaaaaacaagaaagtgtcactgtggaagaagtgttatgtgatctacagtttcttcttcgtccgaaagattgtggcacacattgtcacatttgtattctactgtgttgttttgccttcaactgttctggttcctgaagtaagcgttcctaagtggggagctgtctatattccttcaattgtaactctcctcaatgctgttggaactcctagatcactccacctgatggttttctggatcctatttgagaatgtcatgtccctccaccggacgaaggcaactttcataggtttgctggagataggaagagtgaatgaatgggttgtcactgaaaaactaggagatgctctcaagggaaaattacctgctaaagctaccaagaaaccgcggattaggataagagaaagattacatttgctagaactttgtgctggagcctatctcttcttctgtggatgctatgattttgcctttggaaagaacagatactacattttcctcttccttcaatctattgccttcttcattgctggatttggttacatcggcacctttgtccccaactcttagccaacaagaatcatggctaaacattgtctcctcccaatacttgtcgttcctacgttgtttcttgtcttcaagaaactacaacactgtcattctttggggacaattttttcttatcgttgttgcagatcattgaagcaaaggctgggcattcattttctgctgaacactgtactagggaaactgtttttttttttttttgacctttacaagaaccattgtgatttgttgtcatttttcagagtacaaaatacaaagaaaagagagtaaattggtagaaatagtagcatatacgttgtaccagctcccaagtaatgtagacatctttgtgagggttgtttgatttagaaagttggaatttcttttgcaaataataatgcagatggacaagaatctgtaattcaaatcaaaattcttacaattaattatgtataccctttctcatttttattt

SEQ ID NO: 1721 - DNA, 2476 bp, Solanum lycopersicum
ttttcaatagccattaatacagagctctcataaacaaaatttaaaaaaatatttgctttttttttttgctcccatttcttttcttcaaacacaaaattaaacaaccccatttccttttttctgatttttttgttgcaaaattcaatttttttctacattttctgagaaaaaaaattatttaagccataaatttagtggtgagttttaagctatttgtctgtcttctctgacattccaataggataaaaaaaatctcaccttttttctgcaattttttagaaaaaaaaacacactttttcaagaatcccctgttttcacccccaccccaccattttttttttcattttttgaagaaaaaaaagaatcttttttgctttatagcaaaattttgtggtgggtttgagctattttctgaatttttcacattttcaagaatcccctgttttttttgttctttttttttgtataatggaggggttatcaggaacaaatattgtttataatacattttatggaacaagagatgatataacagaacaatttggtataatgtggggacaaatcaaagctccattgattgttcctcttttaaggatttcagtttttttatgtcttgttatgtctgtaatgttgtttgttgaaagagtttatatgtttgttgtcattactttattgaaagtttttggtaaaaaaccacaaaaaaaatacaaatgggagccattaaaagatgatgttgagcttgctaattcatcttatcctatggttcttgttcaaattccaatgtataacgaaaaagaggtttatcagctttcaattggagctgcatgtggactttcatggccttctgatcgtattatagtacaagttcttgatgattcaacagaccccattactaagaatttggtggaaattgaatgccaaagatgggcaaacaaagggataaatataaaatatgaagtgagagacaataggaatggatacaaagcaggtgctttgaaagaaggattgaaacattcttatgtgaaacaatgtgattttgttgctatttttgatgctgattttcaacctgaacctgattttctatggcaaacaattccatttctagttcacaatcatgaactttcacttgttcaagctaggtggaaatatgttaatgctgatgaatgtctaatgacaagaatgcaagaaatgtcattggattatcatttctctgtggagcaagaagttggctcttcaacacatgcttttttcggatttaatggcactgcaggtgtttggagaatcgcggcgatagatgaggctggaggttggaaggacaggacaacggttgaggatatggacctcgctgtccgtgctagtctcaagggatggaaattcttgttccttggttctgtcaaggtaaaaaacgaattaccaagtacgttgaaggcctatcgttatcaacaacatcgttggtcctgtggcccagccaatctcttcaggaaaatgtgtatggagatcataagaaacaagaaagtatctttgtggaaaaaagttcatgtgatttacagcttcttcttcgttaggaaggtcgtagctcatattgttactttcgtattctatgttgtggtattacccgccactgtattagtacctgaagttgaggttccgaagtggggagctgtttacattcctgccatcattacgctactaaatgctgttggaactccacggtcactccatctgctggtattttggatccttttcgagaatgtaatgtcactccaccgtactaaggccaccttcatcggcttgttggaggcaggacgggtgaatgaatggattgtcacggagaaattaggggacgcgctgaagttaaaatcagctaccaaagcgtttaaaaaacatcgaatgaggctaggtgacaggatccatttgttagagtttgctgctggtgcatacctcttcttctgtggatgttatgacattgcatttggtactaaccactatttcctctacctcttcattcaagcattcgcctttctcatcgttggatttggttacgttggtactttcatccccaactcataatcaacgctcgtgaaactgatcttatggtatgaatcttcagctttttcgccctgtgctcccctctcagtagcaccaaaaaaaaaagtgtggcgttgaagcgccctttcttgttttggggtgttgttttttgatcattttgtaaagagataaatagtttggtatattctttttaggtcatttcaaacatgaaagtgattcgagccctgagggtcagggtcagggtcagggctcgaatcgtgtttgttctctttgtgtatattctcagaaagagtcctatggttaaatgcagcatcatatacataggaaggaaatgcaaaaaagatatgattttttttttcctattcattttactgagatgtaatttggtttcaaatttcaatgcagagctaatgtttacatttctcta

SEQ ID NO: 1722 - DNA, 2601 bp, Aquilegia formosa
aataaaaatctctctaaaccaaacccacctcaacccaacaatctattcttcatcttcttcttcctctctttctgtcttggtgattataaacaatactctgttttttttttcaattagagaaacagagtctttaatttgcagcattggattaaaagagaaaaagattgaaagagggagaaaagggtgatctatggttgttgggtattttttgttttattttgtgtaaatgcttgtttgggtttgagagatctgaagtgggttttgtttgtgggtcttgagtgacgaaggtgtagtgtgtgagcaagtgactgacaaagtccagctctaccgcattgtgtttgacgtaattgagaagcaaaatcacagattgagggaaagattcgtgctcttttcgcaaagtttcttcctttaaattcatgcagatctagtgagtttcattacaccacttcacactctgtgtgtgttttcaaatctcaatcactaggctcttctacatccttccaataaatggatcgatttccttcaacaactcttttacctgaagcatttcaaggaacaagtagtgatgatattacagagcaacttgggtacatttggtatcagatcaaaacaccattaattgttccactaatgaaaatcttactagttgtttgtttagctatgtccattatgctcttcattgaaagagtttatatggctattgttatcttatttcttaagatctttggtcaaaaacctgaaaaacgttataaatgggaaaccattaaagatgatgttgaattgggtaattcagcttacccaatggttcttgttcaaatcccaatgtacaatgaaagagaggtttacagtctttcaattggagctgcatgtggtctttcatggccttctgatcgaattataatccaagttcttgatgactcaacagacccagtcatcaaggatatggtagaaattgaatgtcaaagatggaaaagcaaaggaattaacataaagtatgaaatcagagacaatcgaaatggttacaaagctggtgcacttaaagaaggattgaagcataactatgtaaaactttgcgattacgttgccattttcgatgcagatttccaacctgaacctgatttcctttggcgaactgttccttttcttgttcacaatcccgaaattggtcttgttcaagctcgttggaaatttgtgaattcagatgagtgtttgatgacaagaatgcaagaaatgtccttggattatcattttactgttgaacaggaagttgggtcatcaacatatgctttctttggtttcaatggtactgcgggtgtgtggagaattgcggctattaatgaagctggaggatggaaggaccggactactgtcgaggatatggacttggctgttcgcgctagtctgaagggatggaaatttgtttatgttggtgctcttaaggtaagaaatgagctgcctagcactttcaaggcctaccgttatcagcagcatcgatggtcttgtggtccagctaatctcttcagaaaaatggtagtagagatttggaggaataagagggttactttgtggaagaagctatatgtcatctacagtttcttctttgttcgaaagatcgtagcccacattgttacctttgttttttattgtgttgtgattccgacaactgtttttgttcctgaagttgagatcccaaagtggggtgctgtgtacattccctcgatcattactattctcaatgcagttggaacaccaagatcacttcacctgttggttttttggatccttttcgagaatgtcatgtctctgcaccgaacaaaagcaacctttattggtctgctggaagcagggagagtaaatgaatgggttgtcactgagaaactaggtgatgttctgaaagtaaaaccaagcgccaaggctcctaagaaacctcatcttaagatcggagaaagacttcatctgttggagctcggttttggagcctaccttttcttctgtgcatgctatgattttgcctttggcaagaaccattacttcatctacctatacctacaagccattgctttcttcatagcaggattcggttatgttggaacttttgtgcctaactcttagccagatcacctatggcgagaaccagatacattgccaatcatttaaaaattccttgcaccatgtccatatctttgtcttcaacaacatatattaggggggttttttctccacattttactgcaatattgtgttagcttgtaagaagaaaggggctggtcattctttatgctgaggggattgctcgtctcatgcacccgaagagttctcttgtgaatattcaagaaaccagggaatcatcataaaggtttgagaagaaaacatacaagacaggttgtaatgttatgtgaatgaatcatacaaaaagagaagaagaagaaaaagaacaagcatggataggcagcatatgagctttgactccaagtagataatgtaaacatcgttatggattgtttgtaagtgtgagttttgtagttttctctgttgagttttccctggaaaggaataagctgaatggcaaatgggggtatattttaattctccttacaattt

SEQ ID NO: 1723 - DNA, 2200 bp, Musa acuminata
cttctatctttgctcggttagtcgttttaccttggggatgtttatttatggacggtgggataggaggaggaaacgaccatcacatataaaatggctggaagaatcaagtagcagaccatctttcatcattcctcttcttgctagaagcaggggaagagagctgtggcagtggggttagatcttggtttcgggcgaggagccaaagaatcttaaagctgaaagcttttctctcgatatcttcctgtcgtcttgcttcatacgtctatccagggagggagagagagagagatagggtcacgtttgttctctttctttcccggaggagaagagatggacaggctcacttcgacggccctgctgccggagtcgttccagggggcgagggacgacatcacggagcagatggggatggtgtggcagcagatcaaggccccggtgatggtgcccctgctgcggctggccgtgttcctgtgcctggtgatgtccgtcatgctcgtcgtcgagaaggcgtacatggccgtcgtcatcgtcctcgtcaagctgttcggccggcggcccgagaagcgctacaggtgggagcccatgcgcgacgacctcgagctcggcagctcctcctaccccatggtcctcgtccaaatccccatgtacaacgagaaggaggtctaccagctctccattggagctgcgtgtggcctctcttggccgtcggaccgcatcataatccaagtgctggatgattccacggacccggttattaaggatctggtggaggcggagtgccggaggtgggcgagcaagggggtgaacatcaagtacgagatcagggacaaccggagcggctacaaggctggcgcgctcaaggagggcatgaaacacagctacgtcaatcactgcgactacgtcgccatcttcgacgccgacttccagcccgagcccgacttcctctgccgcaccgtccccttcctcctccacaaccccgccgtcggcctcgtccaagcccgctggaaattcggcggcctgactcgtgccaattttgcagtgaattcggacgaatgtttgatggcgaggatgcaggagatgtcactggattaccacttcacagtggagcaggaagtcggatcctccacatacgccttcttcggcttcaatgggactgccggagtgtggcggattgctgctctcaatgaagctggaggttggaaggaccggaccacggtagaggacatggatttggctgttcgagcgagcctcaagggttggaagtttgtcttccttggagatctcaaggtcaagaatgagctgccgagcactctcagggcgtaccggtatcagcaacacaggtggtcttgtggcccagcaaacctattcagaaagatggcgatggaaattgctaataacaagaaagtgagtctgtggaagaaagtacatgtgatctacagtttcttctttgttcgtaaggtggtagctcacattgtgacctttgtattctactgcgtggttatccctgccgctgtcctggttcctgaggtggaaatacccaggtggggtgcgatctacatcccttccatcatcacccttctcaatgctgtcggaactccacggtctcttcacttgctggtgttttggatcctcttcgagaacgtcatgtccctgcacaggacaaaagccacccttattggcctgttggaagcaggaagagtgaacgagtgggtggtcacagagaagctaggagacactgtgaaggccaaaatggcggtcaaggccgcgaggaagccaccgattaggattggcgatagattacatctactggagctttggacaggcgcttacctcttcttctgtgggtgctacgatgtggcctttgggaagaaccattacttcctctacctcttcctccaagcaattgctttctttgtggtcggatttggttacgtcggcacgttcgtccccggttattgacggccgcagttgagtgcatcgccgaaggacttcatcttctacctcgaagaaaccatttgtttcctctcgtatcgtgtaggattctcctgtgaatacacagccaagcaagcatcagcgtagtggtctataggcagctgatagatacaaggaaaggagcaggaagtcgtcaatctcttgacagcagctgcggctgtgacacagaaaactggttgtatcaaccaaaaataagttttaatgggat

SEQ ID NO: 1724 - DNA, 2386 bp, Cedrus atlantica
ttaacgtcgtaaagacccaacaactacattcttgtctgtgttcattcattaactaagggacgtcagaggtcgatgggcttgtagaggggaagagaataatagaggaagaagatctccgatagttgtattcatcaaggctaggcagcccagatccagatttgtggcaagatatatttgggttttggtacatttttgtttcagaggatctaggtggctagcttggttttctgattcaatatggatcgattatctactgcaaatcttcttccggagacatttcagggcaatgacatgaccgaacagcttgcattgatatggaggcagataagggcgccccttattgctccgttgctgagatttgctgttgttatttgcttgatgatgtctctgatgctgtttgtggagagagtgtacatggctgttgttatagtgttggtgaagctgtttggtaagaggcccgaaaagagatacagatgggagcctataagggatgatatagagcttgggaacagtgcgtatccaatggttctagtgcagattcccatgtataatgaaaaagaggtttaccagctttccattggagcggcatgtgggctctcatggccttcagacaggatcatcattcaagttcttgatgattctactgacccaactatcaaggagttggtaacaatggagtgccagagatgggctagcaaggggataaacatcaaatatgagatcagagacaacaggaatggttacaaggcgggtgctctgaaagaaggaatgaaacgcagctacgtgaaggactgtgactatgtagccatcttcgatgcagatttccagccagaaccagactacttgtggcgaacgattccattcctgatgcacaatcctgaactagctcttgttcaggcccgttggaaatttgtgaattcggatgaatgcttgatgacaagaatgcaggagatgtccttggattatcatttcactgtggaacaagaagtgggctcttctacccacgccttctttgggttcaatggaactgctggagtttggcgaatcaatgctctaaatgaagctggtggctggaaagaccgaacgactgtggaggacatggatttggctgttcgggcaagtttgaagggatggaagtttgttttcgtgggtgatctttctgtcaagaatgagttacctagtacattcaaagcataccgctatcagcagcaccgttggtcttgtggtccagcaaatttgtttagaaagatggtcatggagatccttagaaataagaaagttacagcgtggaagaagttacatgtgatttatgctttcttctttgtaaggaagattgtggctcacattgtcacattcaccttttactgtgtcgtgattcctgcaactgtacttgttccggaagtccaagtacccaaatggggagctgtttacattccttcaatcatcactctactaaatgcagtaagcactcccaaatctctgcatttgcttgttttctggatcctgtttgaaaatgtgatgtctctgcaccgcaccaaggcaactatcattggattattagaagctggccgtgtcaatgaatgggttgtcacagaaaagctcggagatgtcttgaagcataaatctgcgaagcagataaaaaaatctcgcttaagaattggagaaagactccacgtcttggaactcttggctggcgtctatctcttcttctgtgcatcttatgatcttgcgttcggaaaaaatcacttctatatctatctttatctgcaagctgcagcgttctttgtgatgggattcggatatattggaacatttgtgccaacctcctaggaggctaggaccacataaaaaaggcgtcagcctgttctgtttctctgtggcagatcaagcctaatttgagttaaattacctatgtataggttgtatcttctcattctttttaggaggataagtacatggtatagtccccaaagggacagtacttctcatgcgtatccgttagcttatgcgagaagtcaatttcaaagctatgtatgttaccaataaattcagatccaggttgtctctgatgaaggtgtattgggtgtttcaaatggttgtatgataagtaatctcaaatgggagtatttgtgggaaaagttaagatggtttagtattgggtagaattaagttaagatctgcttaactttgaagacggaatgagatacattttatggaactgcattatcagaaaaaagcagaagcattcatatcttgaaatcaatttgttgtattcttcaggacagagggaagggacattatggagggagttcaacctggcctttacatttttagttcagaggtaattgatttctgagagtattctttgttaggtcagtgcctattc

SEQ ID NO: 1725 - DNA, 1772 bp, Citrullus lanatus
tcgggaaaaaaaatggagagtatttcgtcggcaactcttctcccagagacattccaagaaacgagagacgacatatcgttccaagtaatttcattggcttgggaagcaatcaaagttccagttgtggttcctctactccgaatgtcggttttcatttgcctcataatgtcgttaatgctgttcctggaaagagtttatatggggattgtcattgttttagtcaaactcttaagaagaaaaccagagaagcgttacaaatgggagcccatgaaagacgatatcgagcttggcaactctgtttatcccatggttttaattcaaatcccaatgtacaacgaaaaagaggtgtatcagctttcaattggggctgcatgtggactctcatggccgtcggatcgaatcatgattcaagttcttgacgattccacagacccaataatcaaggatttagtggaaatggaatgccaaagatgggccagcaaaggaataaacataaagtacgaaataagagacaatagaaatggctacaaggctggggctctcaaagaaggtttgaaaagaagctatgtgaagcaatgtgattttgttgcaattttcgatgccgattttcaacccgaaccggattttctttggcgaaccgttcctttccttcttcataaccccaaaattgcccttgtccaagctcgctggaaatttgtgaatgcaaatgagtgctttttgacgaggatgcaagaaatgtcattggattatcatttcaccgtggagcaagaagtgggctcctccacttacgccttcttcggcttcaatgggacggcaggtgtttggagaattgcggcactgaatgaggccggaggatggaaagaccgcaccactgtggaagacatggacttggccgtgcgggccagtctcaaaggctggaaattcttgtatctcggagatcttaaggtgaaaaatgaacttcccagctcattgaaagcctaccgttaccaacaacacagatggtcgtgcgggcctgccaatttgttaagaaagatgattatggagattatcactaacaagaaagtaacaatgtggaagaaggtgcatgtgatatatagttttttctttgtgagaaaagtggtagcccacatcaacaccttcgtattttactgcgttgttttaccggcaaccgtgttggtgccggaagttgaggttcccaagtggggatctgtttatattccttccatcattacccttctcaatgctgttggcactccaaggtcattccatttattggtgtattggattcttttcgagaatgtaatggcaatgcacagaaccaaaggcacaattatagggttgttggaggccagcagagtaaatgaatggattgtaactgagaaattaggcgatgcctccaagcctaaacccactttaaaaacccctaaacagcctcgctttaggcttggagaaagggttctcctgtgggagcttggagtgggagcttatttgttcttctgtggcatttacgacattttctttggcacaaatcaattcttcattttcctcttcctccaagccacagccttcttcatcgtcggatttggattcgttggcacccatgtttcttctttttgatcggaatccgccaccgtcgccgcccactcaacttcaactttcttttcccctattttgctgccatgcttctatctaatattattcctcgaaatttaattttcattacattttatattatgtattataatgtgtttttttctctacccaaattcgtt

SEQ ID NO: 1726 - DNA, 1889 bp, Allium cepa
aacccattatccaatccatttttgttactagaataacagtgatcaagaaatggagagactttcatcaacagcattgcttcctgaatcatttcaaggagcaagagacgatgttacggagcaattcggattgatttggcatcaaattaaagctccattaatcgttcctcttttgaggttattggtttcgttatgttttgataatgtcagcaatgttgtttgttgaaaaagtttacatggcaatagtgattgtgcttgtcaagatttttggtaaaaagcctgaaaaagcatataaatgggagcctatgaaagatgatttggagatgggtgcttccgctgattatccaaccgtgcttattcaaattcccatgtacaatgaaaaagaggtttatcaactgtcaattggagctgcttgtggactttcatggccatctgatcgaatcattatacaagtgcttgatgattctactgatcctaccattaaggatatggtggagatggaatgcaagagatgggaaagcaaaggaatcaacataaaatacgagatccgagacaatagaaaaggttacaaagcaggagctctgaaggaaggaatgaagcataactatgttaaacagtgcgattatgtggcaatctttgatgctgacttccaacctgaacctgactttttatggcgcaccattccatttcttgtccacaaccctcaagttggtcttgttcagactcgttggaaatttgtgaattcggacgaatgtctgatgacaagaatgcaagagatgtcgctagattatcatttcactgttgaacaagaagttggatcagccacccatgccttcttcggattcaacggcactgctggagtatggagaattacggctttgaatgaagcagggggatggaaggatcgaacaacagtcgaggacatggatttggctgttcgtgcttcacttcgaggatggaaattcgtattccttggagatgtcaaggtcaaaaatgaacttccaagtacactcaaggcataccgctaccaacaacacagatggtcttgtgggcctgcgaacttgtttcgaaagatggtgatggagattgcaagaaacaagaaagtgactctactgaagaaaattcacgtaatatacaatttcttctttgttcgcaaaatcgtggctcacatagtgacgtttgtgttctactgcatggttatccctgccactgtactggttcctgaagttgaaatacccaaatggggtgcagtttacatcccttccattatcaccctcctcaatgctgtcggtactcccagatcgcttcacttgatggtgttctggattctcttcgagaatgtgatgtctctacacagaacaaaggtgacgttcataggattgttagaggcaggaagagtgaatgaatgggtagtgacagagaagctaggggacgctttgaagaataaagcaaacgcgaacaaagggttcaagaggccacgtatgaggttaggggacaggttgcatgtattggagcttggcgtaggggcgtacctcttcttttgtgggtgctacgatatcgcctttgggaagaatcattacttcatttacctttatgttcaggccattgctttcttcattgtcgggtttggctatgttgggacctttgtccctgggtcgtaaaagcattagttttgtttggtgtatttagacgatatgatacaacttagtgtgtgctacaataagtatatgtgatcaatgttgtgcaactactactgtgcatacttgtgacatgaagtaaacgttgtcgcatttttagagatatgttgttgtaaaactgggagcactagggaaagggaagttcgtacatttctcccgaaatgaagctgaagaagcacggaaacagtagcagga

SEQ ID NO: 1727 - DNA, 1762 bp, Platanus occidentalis
gcagaagagagaaagagagtgaaaggggtgggaaagattcgtgctcttttcgcaaaggaattcctttaaatccatacagatctagtgagggggttccttgggacattgtagacaatctatatcgttgtcctctgttttgaatttcacgcttctgggtctcttttgctgctgtaacgattcgaagagggaaacctatagaaatggatcggctttcttccacgaccgttcttcctgaggcgtttcagggcacgagagacgacattacggagcaatttggattgatttggcagcagatcaaagcgcccctgattgttccacttctgacacttgcgatgtatatgtgtttggccatgtcgcttatgctgttcatcgagaggctttatatgggcatcgtgatcactctagtgaagatgtttgggcgaaaaccagagaagcgttacaaatgggagccgatcagagacgatgtcgagttgggtaattcagcttatcccatggttctcatccagattccaatgttcaacgaaaaagaggtttaccagctctccattggagctgcatgtggcctttcatggccttccgatcgaattataatccaagttctcgacgattccacagacccagcaatcaaggatttggtggaacttgaatgccagagatgggcaagcaaaggcatcaacatcagatatgagatcagagacaaccgaactggttacaaagcaggggctctcaaagaaggaatgaagcgcagctacgtgaaacactgcgactacgtcgccattttcgacgcagatttccaacctgaatcggattttctatggcgttcaatccctttcctggtgcacaaccctgagattggccttgttcaagctcgctggaagttcgtaaactctgatgagtgcttgatgacgagaatgcaagagatgtcgttggattaccatttcacggtggagcaggaagtgggttcttccacctacgccttcttcggtttcaacgggactgctggtatatggaggatcgcggctatcaatgaggccggagggtggaaggaccggactaccgtcgaggacatggatttggccgtccgggcaagtctcaaagggtggaaatttttataccttggtacactcgaggtaaaaaatgaattaccaagtactttcaaggccttccgttatcagcagcatcgttggtcatgtggccctgctaatctgtttaggaaaatggtaatggagattataaggaataagaaagtgactatgtggaagaaattctatgtgatctatagcttcttctttgttaggaagatcatagcccatatagtcacctttgctttctactgcattgtccttccgatgaccgttttggttcccgaagtcgaggttccgaagtggggagctgtttatatcccatccatcattaccattcttaatgcagttggaactccaaggtcagtccacttactgttcttctggatcctcttcgagaatgtcatgtctctgcaccgaactaaagctacctttatcggtctattggagacggggagagtaaatgaatgggttgtcacagagaaattgggagatgctcacaaggcaaaagcaggccccaaagcaccgaagaaacctcgattcaaaatcggagacagaattcatttgttggagcttggattttcagccttcctcttcttctgtggctgctatgactttgcattacgggaaaaacaactacttcttatacctgttcctccaatccatcacattctgcataa

SEQ ID NO: 1728 - DNA, 2270 bp, Arabidopsis thaliana
acacacacacacacacaacactgtgtcttctctccctctgtttctgtttttagatctctcttctctcttctttctttccaaaaatcatcttctccttctccacctttcattatctttcttctcttaccaaaaccctttaaatacaaaaaaaaactaaaacacataaaaaaaatattgaattctcctttttcccgacaatctgagtttctcaggcagagaagacagagattttcaccgtaagggcaaaaaacgaaaaactctgtctctctgtttctgtttcgtccttccttggctttgatttcttacaccaaaagagacatctttaaagaatctcacattgttccctattgcttgtctcacaagagaatccttgatctagggttcttgcttccctcccctgtttttttctttaaattcctcctctgttttctttttgttctcgtcggagtaagaagagatggagctaggagatacgacgtcggtgattccagactcgttcatgggatacagagacgacataacaatgcaaatgtcaatggttttggatcagatacgagctccattgattgttccagcccttaggctcggtgtttacatctgtttgacaatgtcggtgatgctctttgttgaaagggtttacatgggaattgttatctctcttgtgaagctgtttggtcgaaaaccagataaacgtttcaaatatgaaccaatcaaagatgacatcgagcttggaaactctgcttacccgatggttcttattcaaatcccaatgttcaacgaacgagaggtttatcaactatctattggagctgcttgtggactctcatggccttctgatcgaatcgttattcaagttcttgatgattccactgatccaacgatcaaagatctagtggagatggagtgtagcaggtgggcgagtaaaggagtaaacatcaagtatgagatcagagacaacagaaatggatacaaagcaggagctttgaaagaaggaatgaagaagagttatgtcaaaagctgcgattacgttgcaatcttcgacgctgattttcaacctgaagcggattttctatggagaaccgtaccgtatctactccataaccctaagcttgctcttgttcaagctcgctggaaattcgtaaattcggatgaatgtttgatgacaaggatgcaagaaatgtctttggattatcattttacggtggaacaagaagttggttcttctacttacgctttcttcggattcaatggaactgcgggaatatggagaatatcggcattaaacgaagctggtggttggaaagatagaacgaccgtggaagatatggatttggccgtgagagctagtctcaagggttggaaattcttgtacctcggttctttgaaggttaaaaacgagttgccaagtacattcaaggcttataggtatcaacagcacaggtggtcatgtggtccagctaatcttttcaggaaaatggcattcgaaatcatgactaataagaacgtgactttgtggaagaaagttcatgtgatatatagcttcttcgtggttagaaagctagtggcacacattgttaccttcatcttctactgtgtgatcttacccgctacagttcttgtaccggaagttactgttccgaaatggggagcggtttacattccttcagtcattactctcctcaacgccgttgggacaccaaggtcattgcatcttatggtcttttggattctgttcgagaatgtgatgtctcttcacagaacaaaagctacctttatcggtttactcgaaggaggaagagttaatgagtggattgttacagagaagctgggagatgttaaggctaaatcagccaccaagacttcaaagaaggttattcgttttagatttggagatagaattcatgtgttggaactcggtgtaggaatgtatctgttatttgtgggatgttatgacgcgttttttgggaagaatcattattatctataccttttcgcacaagcaatcgcgttcttcattgcgggattcgggcaaattgggacaattgtgcctaaccattgaagggaaaaaggagttttcgagcgacgaattgctcgaggataagaagatgatttgttttctttctttttggattcgctagctatttaaattcttgttggtgtgaatagagagaattgatgataccattgttacagaaatggtgtgtgtagtgtggaagataaaggatacttatagtaaagaagaaatatactttgaaggtttttttcagatt

SEQ ID NO: 1729 - DNA, 1607 bp, Manihot esculenta
ccaatggatcatctttcttctgagagtgtcatctttgattcatatggtttcagtggccaagttggtatgatttggcaagtagtgaaagcaccattaattgtgcctgtcttgaaattattggtgatgatatgcttagtcatgtcaataatgctcttcattgaaagagtttacatgggtgttgtcatagcttttgtgaagttgtttggaaggaaaccaaataagagatataaatgggaggctatcaaggatgatattgagcttggcaattctgcttatcctatggttcttgttcaaattcctatgtacaatgaaaaagaggtttatcaattgtctataggagctgcgtgtgggctttcatggccgtctgatcgaatcataatccaagtgcttgatgattcaactgaccctgccattaagagcttggtggaaatggaatgccagagatgggcaaacaaaggaataaatataaagtatgagataagagataacagaaatgggtacaaagcaggagctcttaaagaaggaatgaaacacagctatgtgaaacaatgcgactatgtggcaatttttgatgctgatttccagcctgagcctgacttcctttggcgcaccattccttttcttcttcacaatcctcacattgctcttgttcaagctcgctggaaatttgttaattctgatgaatgcttaatgacaaggatgcaagaaatgtcattggattaccatttcactgtggagcaagaagtgggctcttcaacttatgccttctttggattcaatggaactgctggtgtatggagaatttcagctctcaatgaagcaggaggatggaaggatagaacaacagtggaagatatggatttggctgtcagggcaagtcttaaaggttggaagttcgtttatattgctgacctcaaggtgaaaaatgaattaccaagcacattcaaagcttacagataccagcaacacagatggtcttgtggccctgcaaatcttttcaagaaaatggcaatggaaataattagaaacaagaaagtgtcaatgtggaagaagttttatgtgatctacagtttcttcttcgttagaaagattgtggctcatattgtcacattcctgttttattgtgttgttttgcctgcgactgttttggttcctgaagtagaagttccaaagtggggttatgtctatattccttctactattactctcctcaatgctgttggaactccaagatcacttcatctattgattttttgggtgctgtttgagaatgtaatgtctatgcatagaaccaaggctacatttataggtttgttggaggctgggagagtgaatgaatgggttgttactgaaaagcttggagatgctctcaagattaagtcaactactaaagcttccaggaaacctcgcctcaggattggagaaagaatgcatatgcaagagcttggtgtgggagcctatctcttcttttgtgggtgctatgattttgcctttggaaagaacagttacttcatatacctgtttctccaatccatggccttcttcatttcaggaattgggtatgttgggacctttgtccccacctcttagccaccacatgccttgcc

SEQ ID NO: 1730 - DNA, 2432 bp, Citrus sinensis
ttctttctcttttttcggcttctaaaaacttgtaaaatacattattattctgcttctgttttcttctcattgctctcaatacagaagcagaaaataccaaaatcagaaaaagaaaattgttctgaataacctttcaagttgatgtcttaagccagtgactgacatccccagctctgcttccattgttttgcgtgatacggaagcaaaatcacaaacaaaagaagaaatatcaaattctcttttgctctttagccaaaggaaggccctttaaatcgaggcagatctagtagtttccttcacaaacttcatagtgcaatcattccatcttttttgccaccgtgttcctacattcgcttctcctctgtttttgtttttcataacaaaatcataaaatgggtcggctagccgcagcaactgtgctacccaattcagctttaggaggaacagatgacatagcagtgcaactttcattactctggggttggatcaaagcgccattgattgtcccattgctaaatatcgcagtttttctttgtttgatcatgtctctaatgctattaatcgagagagtttatatgagcattgtcattttgttgctcaagctctcagggcgcagtcctgaaacaagatacaaatttcagccaatgaaggaagacgttgagttgggtaactcgtcttaccccatggttctggttcaaatcccaatgttcaacgaaagagaggtttaccagctctcaataggagctgcatgcgggctctcatggccgtcggataggctcatcattcaagtccttgacgattcaactgacctaacaatcaaggatatggtggagctagagtgccaaagatgggcaagcaaagggatcaacataaagtatgaagtaagggacaacagaaaagggtacaaagcaggggctctcagagaaggcatgaaacggggctacgttaaaagctgcgattttgttgtcatttttgacgctgatttccagcccgaatctgattttctcacacgcaccatcccttttctcgttcacaatcctcaattagctctcgttcaggctcgctgggaattcgtgaatgctgatgagtgcttgatgacaagattacaagaaatgtcattagattaccattttacagttgagcaagaagttggttcttcgacccatgccttcttcggcttcaacgggacggcaggtgtctggaggattgcagctgtgaatgaggcaggaggatggaaagataggaccacagtggaagatatggatttggctgtccgagctagtcttaaaggctggaagttcttatatcttggtaccgttaaggtgaaaaatgaattgccaagtactttcaaggcctatcgctatcagcagcaccgctggtcttgtggtcctgccaatctcttcaggaaaatggtgatggagattgtaagaaacaagaaagtgtcgttgtggaagaaagtacatgtaatctatagcttcttctttgtcaggaagattatagcacacattattacatttgtgttatattgtgttgtgttgcccgcaactgttgtcattcctgaagttcaggttcccaagtgggctgctgtttatatacctaccgtcattaccattctcaatgccgttggaaccccaagatctatccatctgttggttttctggatccttttcgaaaatgtcatgtcgctgcaccggacaatggcgacctttattggcctgctagagggtgtaagagtaaatgaatggattgtgacagagaaacttggaggcgctcttaaggctaaggcagccgcaaaagcacccaggctacgtaggttctttttcggagacagaatttacctgttagaacttggagttggagcattcctcttctcctgcgggtgctatgatgttttatttgggaacaaccactacttcatttacctttttgtgcaagccttagcattcttcgtcatgggatttggttatgttggtatctatgtcccacacacttagaacaatttctgcagtgatggtgtcaagtctgttggctatctgtcagtctatgaggtcattctctcctgcagcagcacaatatgcgacggtctttttttgcacctttagcttgtacaaaaagataagaatgtcattttttttaggttaagcataaaagattctgagtgaatgactccaaaaaaataaacagttaccctgtgaatatggaagaaatgaaggaagtaacgagagaaaatgttggaatgcattaaagtaagaacaaagggagggcagctgtgggttcgtacccaagtagatatacaacacttatggccttgtatggtttagaatgagaattgtagattttcttcttcatgatctttctttggcctgttttcttatgattggcaatttgtttgagaggcaataaagatgagaaatgtgatcagtttcagattt

SEQ ID NO: 1731 - DNA, 1900 bp, Capsicum annuum
gtgttttttttttgagccaaaaaagaaaatggagagattaacaacaacaaatattcttccaaatacattttatggaagaagagatgatataacagaacaatttggtataatgtggagacaaataaaagctccattaattgttccaattttaaagattttagtatttttatgtcttgttatgtctataatgttgtttattgaaagagtttacatgtttcttgttattacatttttgaaattttttggtaaaaaaccagaaaaaagatataaatgggaaccattaaaagatgatgttgagcttggaaattcatcttatcctatggttcttgttcaaattcctatgtataatgaaaaagaggtttatcagctatcaattggagctgcatgtggactatcatggccttctgatcgtattatagtacaagttcttgatgattcaactgaccctatcactaagaatttggtggaaatggaatgccaaagatggggaagtaaaggaataaatataaaatatgaagtgagggataataggaatgggtacaaagcaggtgcattgaaagaaggattgaagcatagttatgtgaaacaatgtgattttgttgctatttttgatgctgattttcaacctgaacctgattttctatggcatactattccatttttggtgcacaatcctcaactttcacttgttcaagctagatggaaatatgtaaatgctgatgaatgtttattgacaagattgcaagaaatgtcattggactatcatttttctgttgagcaagaagtgggctcttctacacatgctttttttggatttaatggcactgctggcgtttggcgaatcgccgcgatagaagaggctggaggttggaaggacaggacaacggtcgaggatatggacctcgctgtccgcgctagtctcaagggatggaaattcttgttcctcggttctgtcaaggtaaaaaacgaattgccaagtacattgaaggcctatcgttatcaacaacatcgttggtcatgtggtccagccaatctcttcaggaaaatgtgtatggagattgcaagaaataagaaagtgtctttgtggaagaaggttcatgtgatttacagcttcttcttcgtgaggaaagtcgtagcccatattgttactttcgtattctacattgtggtattacctgccactgtattagtacctgaagttgtggtgccgaagtggggagctgtttacattcctgccatcattacgatactcaatgctgtcggaactccaaggtccttccacttgctggtattttggatccttttcgagaatgtaatgtcactccatcgagctaaggccaccttcatcggcttgttggaggcaggacgagtgaatgaatggattgtcacggagaaattaggggacgctttcaagttaaaatcagctaccaaagcatttaaaaaacatcgaatgagacttggtgacaggattcatttgttagagtttgctgctggtgcgtacctcttcttctgcgggtgttatgatattgcctttgggaacaaccattacttcctctacctcttcattcaagcgttcgcctttctcattgttggatttggttacgttggcacattcgtgcccaactcttagtctatgctcgtgaaaactgattttatgatctgaatcttaaggtttttacgccctgtgctccccctcggtagcaccaaaagaagtggcgtttacagtggccttgcgcgcctttcttgttttcgggtgatttttgttttcttgtaaaaagaaggaaagttggttattctttttagataatgtcaagcataaaagtgatctgagcctcgtgggctcgcggggctcggatcgtgtttgttctatttttgtatattccagaaagagtcactaggc

SEQ ID NO: 1732 - DNA, 3069 bp, Picea glauca
ataaaatccaaatacagattggattagtacacttgaaatgtcacttgctatcaggaggcattaaggcagggaatagaccatttgagggagagaaaaaggccttgccttgcttgtcaaacggctggctctacattgcagaaagtgttcagatcttattgatcctgcagtgtagtggagccgttttgactgataggtattattgttgtctccatgttcaaataagaataggcagtgcgaacaatgaatttcaaaaccacattgccaaattcagtggggtataactgtcaggcctaataatacatttcttgttgtgttcattcattaaaaaggaactggaggccatgggcttgtaggaggaagggctggagaataataggaggaagaagatctctgatattcatatttgtccgggctaggcagcccagatccagacctgtggcaagatatattgggttttgttacattttgtttcagaggatctgggtgtcttgcttggttttctgattcaatatggatcggttatcttctgcaaatcttcttccagagtcatttcagggcaatgacatgaccgaccagcttgcattgatatggaggcagatgagagcgccccttattgctccactgctgagatttgccgttggcatttgcttgataatgtctctgatgctgtttgttgagagggtgtacatggctgttgttatagtgttggtgaagctgtttgggaagaggcccgagaagagatacaaatgggagcctataagagacgatatagagcttgggaacagtgcatatccaatggttctggtgcagattcccatgtataatgaaaaagaggtttaccagctttccattggagcagcatgtgggctctcatggccttcagacaggatcatcattcaagttcttgatgattctactgatccagctatcaaggagttggtaacaatggagtgccagagatgggctagcaagggaataaacatcaaatatgagatcagagacaacaggaatggttacaaggcgggtgctctgaaagaaggaatgaaacgcggctatgtgaaggaatgtgactatgtagccatcttcgatgcagatttccagccagaaccagactacctatggcgaacgattccattcctgatgcacaatcctgaagtggctcttgttcaggcccgttggaaattcgtgaattcggatgaatgcttgatgacaagaatgcaggagatgtccttggattatcatttcactgtggaacaggaagtgggctcttctacccacgccttctttggtttcaatggaactgccggagtttggagaatcaatgctctaaatgaagctggtggctggaaagaccgcacaactgtggaagatatggatttggctgttcgggcaagtttgaagggatggaagtttgttttcgtgggtaatctttctgttaagaatgaattacctagtacattcaaagcataccgatatcagcagcatcgttggtcttgtggtccagcaaatttgtttagaaagatggtcatggagatccttagaaataagaaagttacggcgtggaagaagtttcatgtcatttatgccttcttctttgtaaggaagattgtggctcacattgtcacattcgccttttactgtgttgtgattcctgcaactgtacttgttccggaagtccaagtacccaaatggggggctgtttacattccttcaatcatcactctattaaatgcagtaagcactcccaaatctctgcatttgcttgttttctggatcttgtttgaaaatgtgatgtctctgcaccgaaccaaggcaactatcattggattattagaggctggccgtgtcaatgaatgggttgtgacagagaagcttggagatgccatgaagcataaatctgggaagcagatgaaaaaatctcgctcaagaattggagaaagactccacgtcttggaactcttggctggtgtctatctcttcttctgtgcatcttatgatctcgcttttggaaaaaatcacttctatatctatctttatctgcaagctgcagcgttcttcgtgatgggatttggatatattggaacatttataccaacatcctaggaggctaggactacataaaacagaggtgttagcctgttccgtttcgctgtggcagataaggcctgttttgagttcaattacctatgtatagattgtatcttctcattctttttaggaggataagtacatggtatagtccccaaagggacagtacttctcatgcatatctcttagcctatgcgagaagtcaattttatagctatgtatgttaccaataaaatcagattcagcttctatctctgatgagggtgtattgggtgtttcaaatggtcattcaattatgattaatctcagatgtgggagtgtttaatctcagatgtgggagtgtttgagggaagagtcaagatggtttagtcttaagtagaattaagttaagatctgcttaactttgaagacgggatgagatgcatttatggaactgcattatcagaaaaagcagaggcattcacatcttgaaattagtttgttgtattctttgcaacagagggaaggatatcatggaggggactcagctcaaaggagacacatgtaatcaagctggcctttacattcttagtttcagaggttattgattcctgagagattctttgttaggccagcgccattctgaagatttacaaacatgctcgtggcaatgtgtgacacataaattaaagactattgaagctgtgaggaaattgtgataggcaactcttatgaaagagagataagatagctactcggtgggaagttgcgagagatgattgatagatttcttctttcgttgcccctccataccctttgtctatgatgataaaagatatagaaatttgtacctgactgtctgttacatgtaatgttcgtggtgaaacccacacatatggcctggcctgcaataaaattctttggattatcactttgtacgagatgtgtaaatgattgtctgaaattattaagcaactaatggaacttgaattatatttatcc

SEQ ID NO: 1733 - DNA, 2199 bp, Quercus alba
caaaaaggcaaaaacatattcgtgctctttttcgcaaagtgaaccatcttatactctttcacttccttgctagctttcccatcaccttctcatagctttttggtttgtttttcttattaacaacaaagaaaaaagccttgaaatggatcggctttcatcgtcgacaattcttccagacgcatttcaaggagccagagatgacatttccatgcaacttgaaattatctgggctcagatcaaagcgccattgattgtccctctgttaagaatctcagtggttttgtgcttgatcatgtcggtgatgctgttcatcgagagggtttatatgggtattgtcattgttctgattaagctgtttggtcgaaaacccgaaaagcgttacaaatgggaggcaattaaagacgacgttgagcttggaaactcagctcatcctatggtccttgtccaaatccccatgtacaacgaaagagaggtgtatcaactatcaattggagctgcatgtgggctttcatggccttctgatcgaatcatcatacaagtacttgatgattccacagacccaacaataaaggacttggtggagctagaatgtcaaaggtgggcaagcaaaggcataaacataaagtacgaaattagagacaacagaaatgggtataaggcaggtgctttgaaagaaggcatgaagcgtagctacgtgaaacactgcgattatgtagccattcttgacgcggattttcaacccgaaccagattttctatggcgaaccatacctttccttacccataatcctcaactagcactcgttcaggcccgttggaaattcgtgaactccgatgagtgcttgatgacaagaattcaagaaatgtcattggattaccatttcacagtggagcaagaagtggggtcatccacatatgccttctttggattcaatgggacagcaggtgtgtggagaattgctgcacttaatgaggctggaggatggaaagacaggaccactgtggaagatatggacctggctgttagagctagtctcaaaggatggaaatttttgtacctcggaggtgttcaggtgaaaaatgaattgcctagtacattgaaagcctaccggtaccaacaacatcggtggtcatgtggtccggccaatcttttcaggaaaatggtagtagagattataagaaacaagaaagtatctttatggaagaagttacatgtgatatacagcttcttctttattcggaagatcatagcccacataagcacatttgtgttttactgcattgtactaccagcaactgttgtagtacctgaagttgcggttccaaagtggggatcagtttacattccatccctcatcacccttcttaatgctgttggaactccaaggtcactccacttaatggttttctggatcctttttgagaacgtcatgtcactacatcgaatgaaggctaccatcattggtctactagagacaaatcgagcaaatgaatggattgtaacagagaaactaggagatgctttcaaggctaaagcaggcttgaaagcaccaagaaaacctcggttcaggattggaggaagactccatttactagagcttgcagttggagcttacctattatttattggctggtatgatgttttctttggaaaaaaccacttcttcctattcctttttatgcaagcagctgcatcatggggtttgggtacgttggcacctttgtcccaaactcttagaggaactccaacaatgatactgaagttctttttgccattttgttaatgtgtctgtataatttctgcttcagcaacatatacatgaccattcataccgacaatatcttgaaattatagctttgtaaaaaagaacaaaactatatatggtcaattttctaggctcgcatgatatttgagatagtgattcgaaaaatttagttctctttgtgtatacattaaaggaaaattacagaacaaaaggattgttaccagaatgtgcattatacagaaaggaggaactgaaggcagtttgtgggaaggacccagaccccaaagtaaacatctttgagtggtttttttttctagctttttatcatatttttctctgttcttattcccttgttttgttggatttgtttgaagaagaataaacagtaaacagttgggaaaggaaaagatcaatgttacatctctctttactaa

SEQ ID NO: 1734 - DNA, 1206 bp, Glycine max
aagtgttccaaaatccaaacacacactctctcccccatggcgttgaacaatggcgtccccgccactggcaccggcctcatcgttagcttcggcgagatgctcatcgacttcgtccccaccgtctccggcgtgtccctggccgaggcccctggcttcctcaaggcccccggcggcgccccagccaacgtcgccatcgccgtgtcgcgactcggcggcaaagccgccttcgtcggcaaactcggggacgacgagttcggccacatgctcgccggaatcctcaaggagaacggtgtccgcgccgacggcatcaccttcgaccagggtgcacgcaccgcgctggccttcgtgaccctacgcgccgacggggagcgtgagttcatgttctaccggaaccccagcgccgacatgctcctcaagcccgaagaactcaaccttgaactcatcagatctgcaaaagttttccattacggatcaataagtttgatcgtggagccatgcagatcagcacacttgaaggcaatggaagttgccaaggaagctgggtgcctgctctcctatgaccccaaccttcggctaccattgtggccttcgcctgaggaagctcgtaagcaaatactcagcatttgggagaaggctgatttgatcaaggtcagtgatgtggagcttgagttcctcaccggaagtgacaagattgatgatgaatctgctttgtcattgtggcaccccaatttgaagttgctccttgtcactcttggagaacatggttccagatactacaccgagaatttcaaaggatcagtagatgcttttcatgttaatacagttgatacaactggtgccggtgattcctttgttggtgctctattgtccaagattgtcgatgatcagtccattcttgaagatgaaccaaggttaagagaagtactcaagtatgcaaatgcatgtggagcaattacaactacccaaaagggagcaattcccgcccttcccaaagaggaggatgcactgaaactgatcaaaggcgcatagaatcttttgacaaaaatgctagcatgatttcgttttcttcctctaatgtttcaattttccgttggatttgcttgctatcaatttaggagggaatgcctcttgattttctttggtattttttgtttttttttctcctatgcactgttttcaggttttaccaaaataacgctttctttc

SEQ ID NO: 1735 - DNA, 1343 bp, Phaseolus vulgaris
atgcagaactccttctatataatcgccaccaaaacaaatgtcttattctctctctttctcttcgtcttctctcaaacactgtttcaaagtccaaacacattctctctctttccatggcattcaacaatggcgtccctgccaccggctccggcctcatcgccagtttcggcgagatgctcatcgacttcgttcccaccgtctccggcgtctccctggcggaggctccgggcttcctgaaggcccccggcggcgcccccgctaatgtcgccatcgccgtcgcgagactcggcggcaaggccgccttcgttggaaaactcggcgacgacgagttcggccacatgctcgccggaatcctgaaggagaacggagtccgcgccgatggaatcaccttcgatcagggcgcccgcaccgcgctggcgttcgtgaccctacgcgccgacggagagcgtgagttcatgttctaccgaaaccccagcgccgacatgctcctcaaacccgaagaactcaaccttgaactcatcagatctgctaaagttttccattacggatcaattagtttgatcgtggagccatgcagatcagcacacttgaaggcaatggaagttgccagagaagctggctgcctgctctcctatgaccccaacctccgtctccccttgtggccctcggccgatgaagctcgtaagcaaatactcagcatatgggagaaggctgatttgatcaaggtcagtgatgtggagcttgagttcctcacaggaagtgacaagattgatgatgcttctgctttgtcattgtggcaccccaatttgaagttgctccttgtcactcttggagaacagggttccagatactacaccaagagtttcaaaggatcagtagatgcttttcatgtgaacacagttgatacaactggtgccggtgattcctttgttggtgctctgttgtccaagattgtcgatgatcagtccatccttgaagatgaaccaaggttaagagacgtactaaagtttgctaacgcatgtggagcaattacaactacccaaaagggagcaattcccgcccttcccaaagaggaggatgcactcaaaatcatcaaaggggcatagaatctttggacaaaatactcaatcatttcgttttctccccccaatgtttctgtcggatttgcttgctatcaatttacgaggaaatgcctcttgattttctttagtactttttgtttttcctcctatgcactgacggcgagatcatgggttttcaggttttgccaaataacgttttctatcaagttttgagaattagcaatgaaatcaaatattgaatcataagcttggcccacagtt

SEQ ID NO: 1736 - DNA, 1405 bp, Cajanus cajan
aacacacacactctctctctcccatggcgttgaacaacggcgtccccgccaccggcaccggcctgatcgcgagcttcggcgagatgctgatcgacttcgtccccaccgtctccggcgtgtcgctggcggaggcgccggggttcctgaaggccccaggcggcgccccggccaacgtggcgatcgcggtggcgcggctgggcggcaaggcggccttcgtggggaagctgggcgacgacgagttcgggcacatgctggccggaatcctgaaggagaacggcgtgagaggcgacggcatcaccttcgacgagggggcgcgcaccgccctggccttcgtgaccctgcgcgccgacggagagcgggagttcatgttctaccggaaccctagcgccgacatgctcctccgccccgaagagctcaacctcgaactcatcagatctgcaaaagttttccattacggatcaataagcttgatcgtggagccatgcagatcggcacaccttaaggccatggaagttgcgaaagaagctgggtgcctgctttcgtatgatccaaaccttcggctaccattgtggccttcagccgaggaagctcgtaagcaaatactgagcatatgggagaaggctgacctgataaaggtcagtgatgtggagcttgagttcctcactggaagtgacaagattgatgatgattctgctttgtcattgtggcaccccaacttgaagttactccttgtcactctaggggaacacggttccagatactacaccaagaatttccatggatcggtagatgccttccacgttaatacagttgatacaactggtgccggtgattcctttgttggcgctctattgtccaagattgtcgatgatcaggccatacttgaggatgaaccaaggttaagagaagtacttaagtttgcaaatgcatgtggagcaatcacaaccactaaaaagggagcaattcccgcccttcccaaagaggaggacgcgctgaaactgatcaaaggggcatagaatcttttgacaaaagtattagcatgatttcgttttctggattttcttgctatcattttacgagggaacgcttcttgattttctttgtatttttgtttttcctcttatgcactaacggcacgatcacgtttgctggatttgccaaataacgttttccttcaaattttgaatgaaaatttgattcataagctcggtccatagctacaacttaaaccacttcatattttttttatcaatgaaattgtcgtctgtccaacctttaataaaagaagaaaatttaggagcgaaaggccaaccagactctacccagtccaaaaacattagtaactgtaacgcggacaagaatagatcaatgggtcgtgttcaccacttggaattaaatttgtaac

SEQ ID NO: 1737 - DNA, 1328 bp, Glycyrrhiza uralensis
ctctctctccatctctttgcctctcccaacagtactcctttgttgaaaatcacaacacacactattctctctctctctctctctgtttctccattctccgttacttgaaagaccaatcgatggcgttgagcaatggcgtccccagcacgggcaacggcctcatcgtgagcttcggcgagatgctgatcgacttcgtcccgacggtttccggcgtctcactggcggaggcgccgggattcctcaaggcacccggcggcgcaccagccaacgtggccatcgccgtctccaggctcggcggcaaggctgccttcgtcggcaagcttggcgacgacgagttcggtcacatgctcgccgggatcttgaaggagaacggcgtacgcgccgacggcattaccttcgacacgggagcacgcactgccttggccttcgtcaccctacgcgccgacggggagcgtgagttcatgttctataggaaccccagcgccgacatgctactcaagcccgaagaactcaacctcgaactcatcagatctgcaaaagttttccattatggttcaataagcttgatcgtggagccatgtagatcagcacacctgaaggcaatggaggtcgcaaaagatgctggatgccttctctcctatgatccgaacctccgcctacccttgtggccctccgccgaggaagcccgtaagcaaatactgagcatatgggaaaaggctgatttgatcaaggtcagtgatgtggagctggagttcctcactggaagtgacaaaattgatgatgcttctgctttgtctttgtggcaccccaatttgaagttactccttgtcaccctcggtgaacatggttccagatactataccaagaatttccatggatcagtagatgcgttccatgtcaatacagttgatacaactggcgccggtgattcctttgttggtgctctgttgtccaagattgttgatgatcagtcaatactagaagatgaggcaaggttaagagaagtactcaagttttcaaatgcatgtggagcaatcacaactaccaaaaagggagcaatccctgcccttcccaaggaggaggatgttctgaacctgatcaaaggggcatagatttcgttttcttcccatctttgtttcacttttcagttggagttgctggctatcaatttaagacggaattctcgcccgattatctttggtttttttttttttatttctttttcttgctcttctgtattgacggcaaaatcatgcgctttgaggttttgccaaataatgttttctttcaagttttgagattagccgttgaatgaaaatttgatccat

SEQ ID NO: 1738 - DNA, 1245 bp, Vigna unguiculata
caaagaacgtttcagaaagtccaaacacattctctctcttccaatggccttcagcaatggcgtccctgccaccggcaccggcctaatcgccagcttcggcgagatgctcatcgacttcgttcccaccgtctccggcgtctccctggcggaggctcctggcttcctaaaggcacccggcggcgcccccgctaatgtcgccatcgccgtcgcgagactcggcggcaaggccgccttcgttggaaaactcggtgacgacgagttcggccacatgctcgccggaatcctgaaggagaacggagtccgcgccgacgggatcaccttcgaccagggcgcccgcactgccctggcgttcgtgaccctacgcgccgatggagagcgtgaattcatgttctacagaaaccccagcgccgacatgctcctccaacccgaagaactcaacctcgaactcatcagatctgcgaaagtttttcattacggatcaattagtttgatcgtggagccatgcagatcagcacacttgaaggcaatggaagttgccaaagaagctgggtgtctgctctcatatgaccccaacctccgtcttcccttgtggccctcggccgacgaagctcgtaagcacatactgagcatatgggagaaggctgatttgatcaaggtcagtgatgtggagcttgagttcctcacaaaaagtgacaagattgatgatgcttctgctttgtcattgtggcaccccaatttgaagttgctccttgtcaccctaggagaacagggttgcagatactacaccaagaatttcaaaggatcagtggatgctttccatgtcaagacaattgatacaactggtgccggtgattcctttgttggtgctctgttgtccaagattgtcgatgatcagaccatccttgaagatgaatcaaggttaagagacgtactcaagtttgctaatgcatgtggagcaattacaactacccaaaagggagcaattcccgcccttcccaaagaggaggatgcactgaaactcatcaaaggggcatagaatctttggacaaaaatgcccaatcatttcgttttcttcccccccgatgtttcaagtttcctcatgtttcttggattttctttgtagtactttgttttttttttcttttttcctatgcactggtggcgagatcatgggttatcaggttttgccaaataacgttttctatgaagttttgagaattagcaattgaatgaagttttgccaaa

SEQ ID NO: 1739 - DNA, 1367 bp, Lupinus angustifolius
tctttaattaatactaacccaattaactcattttcattaaaactaatagtaccttttttctatataaagctgataaaaccaaaaccttaccttctctcattcctctctcaaaataaaaaacactctctccaatggctttgaacaatggtatccccgccaccggcaccggtctcatcgtcagcttcggtgagatgctcatcgacttcgtcccaaccgtctctggtgtctccctagctgaggcaccgggattccttaaagcccccggcggtgctccggctaacgtggccatcgccgtcgcaaggataggcggaaaagccgccttcgtcggaaaactaggagatgatgagttcggtcacatgctggcggggatcttgaaggaaaacggcgtacgcgccgatggtataacatttgatacgggtgcacgtactgctttggcgttcgtgactctacgcgctgatggggagcgtgagtttatgttttataggaacccgagtgctgatatgttgcttaggccagaagaactcaaccttgaactcatcagatctgcaaaagttttccactatggatcaataagtttgatagtggagccatgcagatcagcacacttgaaagccatggaagttgccaaagaagctggttgtcttctgtcctatgatccaaacctgcgcctaccattgtggccatcacctgaagaagctcgtcaacaaattctcagtatatgggaaaaagctgatttaatcaaggtcagtgatgtggagcttgaattccttactggaagtgacaaaattgatgatgcttctgctttgtctttgtggcaccccaacttgaagttactccttgtcactgttggtgaacatggttctaaatactataccaagaatttccatggatcagtagatgcttttcatgtcaagacaattgatacaacaggagctggtgattcctttgttggttctctattggccaagattgttgatgatcaatccatacttgaagatgaaccaaggttaagagaggtgctcaagtttgcaaatgcatgtggagcaattacaactactaaaaagggagcaatccctgctcttcccaaagaggaagatgtgttcaacctgatcaaagagtcatcagcataaaaatggaagcacaagtgttagcatgatttcatttcttcacccacttgccttctttttattcctagtttcacttttccgtttgagtttcttgctatcaatttatgagggattttgtctcttggttttctttgcaattttccacgtttctctgtattgactttttgcaaaatgctttcttccaagttgaggttaattgttgaataaaatcataaaacatgacccaacaaaaaagaaaaa

SEQ ID NO: 1740 - DNA, 1392 bp, Lotus japonicus
tctctccttctatataaacaccaccaaccccattctctgcctctcccaacactcattgaagaaaatcaacacctatctctctctctctctttcctcaaaagtcaaaatcaacctccaatggcgttgaacaatggcgtccccagcaccggcaccggcctgatcgtcagcttcggcgagatgctgatcgacttcgtccccaccgtctccggcgtgtcccttgcagaagccccgggattcctcaaagcccccggcggcgcacccgccaacgtcgccatcgctgtttcccgactcggcggcaacgccgccttcgtcgggaagcttggcgatgacgagttcggtcacatgctcgccgggatcttgaaggagaacggcgtccgcgccgacgggatcacgttcgatgaaggcgcgcgtaccgcactggcgtttgtcaccctacgcgccgacggggagcgtgagttcatgttttatagaaaccccagcgccgacatgctcctcaaacctgaagaactcaacctcgaactcatcagatctgcaaaagttttccactatggttccataagcttgatcgtggagccatgtagatcagcacacttgaaggcaatggaggttgccaaggatgctggatgtcttctctcctatgaccctaacctccgcctgccgttgtggccgtcagcagatgaagctcgcaagcaaattctgagcatctgggacaaggctgatctgattaaggtcagtgacaatgagctggagttcctcactggaagtgacaaaattgatgatgaatctgctttgtcattgtggcaccccaacttgaaattactccttgtcactctcggtgaacatggttcaaaatactacaccaagaatttccgtggaacagtagaaggttatcatgtcaacacggttgatacaacaggcgccggtgattcctttgttggttctctgttgtccaagattgttgatgatcaatccattcttgaagatgagccaaggttaagagaagtgctcaagtattcaaatgcatgtggagcaattacaactactaaaaagggagcaattccagcccttcccaaggaagaggatgtgctgaagctcatcaatggagcataaaaactttttaccgcataatctcattttcttgtccagttttttttttcacttttttttttcgtttgagttgctggtttaagagggaatttgtctcttgaatttctttagttttcatttcttggtcttctgtattttgacggcaagatcatgtgctttgagattttgccaaataatgttaacttccaagttttgagatcagtgattgatgaaagcttgattcataagcgttgcagcttcttaacccacattacctttttattaattagtttttcttttctgtct

SEQ ID NO: 1741 - DNA, 1471 bp, Cicer arietinum
attcttatctctatctgtataatactaattataccataccaactccttctatataataacgaccaaacccgttgtgatctctctctctctctctctctctaaaaatcaacgcattctctttctctaatttcaatggcatcaagcaatggtatcccaacaggcaacggtctcatcgtaagcttcggcgagatgctgatcgactttgtcccaacgacttccggcgtatcactagcggaggcgcccggtttcctcaaagcacccggcggcgcaccggctaacgtagccatcgccgtttccagactcggtggcaaagctgcgtttgtaggcaaactcggtgacgatgagttcggtcacatgctcgccgggatcttgaaagaaaacggcgtcgtcgccgatggtataacattcgatcaaggtgcacgcactgctttggcttttgttactctacgcgccgatggagaacgtgagttcatgttctatagaaatcccagtgctgacatgcttcttaaacctgaagaactcaacctcgaactcatcagatctgcaaaagttttccattatggatccataagcttgattgtggagccatgcagatcagcacacttgaaggcaatggaagttgccaaagacgccggctgccttctctcttatgatccaaacctccgcttacccttgtggtcctcagccgatgaagctcgcaagcaaattctcagtatatgggaaaaggctgatttgatcaaggttagtgatgtggagctagagttcctgactggaagtgacaaaattgacgacgcttctgctttgtcattgtggcaccccaatttgaagttgctccttgtcactctcggtgaaaatggctcaagatactacaccaagaatttccatggatcagtagatgcatttcatgtcaaagcagttgatacaactggtgctggtgattcctttgttggtgctctattgtccaagattgttgatgatcagtccatactagaagatgaaccaaggttaagagaagtgctcaagtttgcaaatgcatgtggagccatcacaactactaaaaagggagcaattcctgcccttcccaaagaggaggatgtacttagcctgatcaaagcctgatcaacacatagattcctttagcatatttcgttttcttcccatcttgtttcactttttcattggggttactcgcaactaatttcgagtgaaattgtctccaattttatttttcttcttgattttctgtatcacggcaaaatcatgtgcttgggagtttggacaaataatgtttttgagttttggtattagcttttgaatgaaaacttgattcaggcattgttgctgctttgctgcttcttaataaatatttatatgtctgttaatttttctgagtctaatgttcggtttaatttgtcatgctcagtgtacttgtgtggttatcatttttttccaagttaaggatagattagtg

SEQ ID NO: 1742 - DNA, 1252 bp, Vicia sativa
attctctcaaaaattataacactttctctctctcaaattccaatggcgtcaaacaatgtcttcccacccaccggcaccggcctcatcgtaagcttcggcgagatgctgatcgacttcgtgcccacagtctccggcgtatcactcgctgaagcaccgggcttcctcaaagcccccggcggtgcaccagctaacgtagccatcgctgtgaaccgactcggcggcaaagccgccttcgtcggtaaactaggggacgatgaattcggtcacatgctcgccgggatcttgaaggagaacggtgtcaaaaccgatggtattactttcgatcaaggcgcgagaaccgctttggcttttgttactctacgcgccgacggagagcgtgagtttatgttttatagaaatccaagtgctgacatgcttcttaaacctgaagaactcaacctcgaactcatcagatctgcaaaagtgttccactatggatccattagtttgattgtggagccatgcagatcagcacatttgaaggcattggaagttgccaaggatgctggctgtcttctttcctatgatcccaaccttcgactaccgctgtggccatcggccgacgaagctcgcaagcagatattgagtatttgggagaaggctgatttgattaaggttagtgataacgagctggagtttttgactggaagtgacaagattgatgatgagactgccttgacattgtggcaccctaatttgaagttgctccttgtcaccctcggcgaacacggtgcaaagtattacactaagaatttccatggaacagtagatgcattccatgtgaatacaattgatacaactggtgctggtgattcctttgttggtgctttattggctaagattgttgatgatcagtctatactagaagatgaaccgaggttaagagaagtgcttaagtttgcgaatgcgtgtggagcaatcacaacgactaaaaagggagcaattcctgctcttcccaaggaggaggatgcactgaaattgatcaatgctgcatagatttgttgagcatatttcgttttcttcccatcttgtttagcttttttgttgaaggtgctcttgatcaaattaagagggagtttgtctctaattttgtttgttttttttctttatgaattgatggcaaaatcatatgattagtttggccaaataatgttattgaattttgatatgagctgttgaatgaaaatttgattcacgcgtgttgctgcttttt

SEQ ID NO: 1743 - DNA, 1299 bp, Trigonella foenum-graecum
acttctctctctcccaatacactgaaaatcaaaacactttttttctctcaaaaatccattcacttcaatggcttcaaacaatggcatcccaaccacaggtaccggtctcatcgtaagcttcggcgagatgctgatcgactttgtccccacagtctccggcgtctctctcgcagaggctcccggtttcctcaaagctcccggcggtgcaccagccaatgtcgccatcgctgtttcccggctcggaggcaaagccgcctttgtcgggaaactcggcgatgacgagttcggtcacatgctcgccgggatcttgaaggaaaacggtgttgtcgccgaaggtataacgtttgaccaaggagcacgtactgctttggcgtttgttactctacgcgccgatggagagcgtgagtttatgttttatagaaatcctagtgctgacatgcttcttaaacctgaagaacttaacctcgaactcatcagatctgcaaaagttttccattatggatccataagcttgattgtggagccatgtagatcagcacacttgaaggcaatggaagttgccaaagaagctggctgccttctctcctatgatccaaacctccgcctacccttgtggccctcagccgatgaagctcgcaagcaaatattgagtatctgggaaaaggctgatttgatcaaggttagtgataatgagctggagttcctcactggaagtgacaaaattgatgatgctactgctttgacattgtggcaccccaacttgaagttgctccttgttactctcggtgaagatggcgcaagatactacaccaagaatttccatggacaagtagatggattcaaagtcaatacagttgatacaactggtgcaggtgattcctttgttggtgctctattggccaagatagttgatgatcaggccatactagaagatgaatcaaggttaagagaagtactcaagtttgcaaatgcatgtggagcaatcacaactactaaaaagggagcaattcctgctctacccaaggaggaggatgtacttaacctgatcaaagcatagattcctttagcatattttgttttctttccatcttcttttgccttttcgttggggttgctcttaatcaatttaagagagaatttgtctctaattttcttggtttctttctttattttctgaattgacatcaaaatcatatgccgagtttggccaaataatgtttagggagttttgatatgagttgttgaatgaaaatttgattcagcagtgttgcttcttaatctatatctatgttaattttg

SEQ ID NO: 1744 - DNA, 1387 bp, Phaseolus vulgaris
ttgttgtttattatgaccaaaatttgaagattaaggaaaggattgacggatttacttatcttaattcttgttttcttcactatataaactctacaaaattagtatccaaactcactctatcatcttcaacctccaattcaaatcaaaattccatactcagaagccatggcctccaccaatgctcttcctcccaccggcaccggcctcgtcgtcagcttcggcgagatgctcatcgacttcgtccccaccgtctccggcgtctccctcgccgaggccccgggtttcctcaaggctcccggcggcgcccccgccaacgtcgccatcgccgtcgcgagactcggcggcaaggcggctttcgttggcaagctcggcgacgacgagttcggccacatgctcgccgcaatcctcaaggagaacgacgtgagatccgacgggatcaacttcgaccagggcgcgcgcactgcgctcgcgttcgtgaccctacgcgccgacggagagcgtgagttcatgttctacagaaaccccagcgccgacatgctcctcacgcccgaagatctcaatcttgaactcatcagatctgcaaaggtatttcattatggatcgataagtttgatcgtggagccatgcagatcagcacacctgaaggcaatggaagttgcgagggaagcagggtgtctgctttcttacgatccaaacctgcggctacccttgtggccatcacctgaggaagcgcgtcagcaaatactcagcatatgggagaaggctgatttgataaaggtgagtgatgtggaactggaattcctaaccggaagtgacaaaattgatgatgaatctgctctctcactgtggcaccccaatttgaagttgctccttgtcactcttggggaacatggttctaggtactacaccaagaatttccatggatcagtggacgcttttcatgtcaacacagttgatacaactggcgcaggcgattcctttgttggtgctctattatgcaagattgtcgatgatcaatccatacttgaagatgaagcaaggttaagggaagtactcaagtttgcaaatgcatgtggggccattacaactactaaaaagggagcaattcccgctcttcccacagaggctgatgccctcaacctgatcaaagaggcatagaaatttagtgctattatcttttggttttctttatatatatctctcttcatcttttcacttttctgctgaagtttcttgctatcaacttaagatggattttgatccttggttttctatgttttatttcccccctcattctgcattaacagtaatatcatatgatttggggttttttgcaaatgaaaatttgactccttgtcatcttggccaacaatggctttttcttcgg

SEQ ID NO: 1745 - DNA, 1255 bp, Medicago truncatula
ccaaaacccaaaacacttttttttctctctcaaaattcactcacttttcaatggcttcaagcaatggcatcccaaccacaggcactggtctcatcgtcagcttcggtgagatgctgatcgactttgtcccaacagtctccggggtctccctcgcagaagcccccggtttcctcaaagctcccggcggtgcaccagcgaacgtcgccatcgctgtttcccgattaggcggtaaagctgcctttgtcgggaaactaggcgatgacgagttcggtcacatgcttgccgggatcttaaaggaaaacggtgtggttgccgaaggtataacctttgaccaaggtgcacgtactgctttggcgtttgttactctacgcgccgatggagagcgtgagtttatgttttatagaaatccaagtgctgacatgcttcttaaacctgaagaactcaatctcgaactcatcagatctgctaaagttttccactatggatccataagcttgattgtggagccatgtagatcagcacacttgaaggcattggaagttgccaaagaggctggctgccttctctcctatgatcctaaccttcgcctacccttgtggccctcggccgatgaagctcgcaagcaaatactgagtatttgggaaaaggctgatctaattaaggttagtgataatgagctggagttcctcactggaagtgacaaaattgatgatgctactgctttgacattgtggcacccaaatttgaagttgctccttgtcactcttggtgaacatggcgcaagatactacaccaagaatttccatggacaagtagatggattcaaagttaacacagttgatacaactggtgctggtgattcttttgttggtgctctattggccaagattgttgatgatcaggccatactagaagatgaatcaaggctaagagaagtactcaagtttgcaaatgcatgtggagcaatcacaactactaaaaagggagcaattcctgctcttcccaaggaggaggatgtactcaacctgatcaaagcatagattcctgcatatttacttttctttccattttttttttccaccttttcattgttgttgctcttaatcaatttaagagagaatttgtctctaattttctttgttatttctttattttctgaatcagacatcaaaattattgccgagtttggccaaataatgtttagggagttttgatgagttattgaatgaaaatttgattcaagagtattgctgct

SEQ ID NO: 1746 - DNA, 1551 bp, Cicer arietinum
tttaaaacattttttattttcaaatatttgtcagtttttaattttagaaaaactattatccaatacaagtacttcctctgtcctaaatgagtgactcatgtatatagataaaagattatcctaatatttgaacttatcaccattgatcgattgtttttatcctaattttatttttctaaacaaaatttgtatggtaatattttattatcgctcttttgctatttaaaccccacctaatcacctctctactctctcttcttcttcttcagtaaaaaaaaagtctctcttctctcaacacagaacaacaaatccatggcttccaacactcccatcccctccaccggcgaaggtctcatcgtcagtttcggcgagatgctaatcgacttcgtccccaccgtatccggcgtctccctcgccgaagctcctggcttcctcaaagctcccggcggcgctcccgctaatgtcgcgatcgccgtctctagactcggtggtaaagccgccttcgtcggcaagctcggcgatgatgagttcggacacatgctcgccgggatcttgaaggagaacaacgtcagagccgacgggattaactttgacaaaggtgctcgtacagcactcgctttcgtcaccctacgcgccgacggagagcgtgagttcatgttctacagaaatcccagcgccgatatgcttctcactcctgaagatctcaatctcgaactcatcagatctgcaaaagtattccattatggatccataagcttgattgtggagccatgcagatcagcacatctgaaggcaatggaagttgcgaaggatgcagggtgcttactctcttatgatccaaacctccggttacctttgtggccatcaccagaggaagcccgtaaccaaatactcagtatatgggacaaggctgatttgatcaaggtcagtgatgttgagctggaatttctaactgggagtgataaaattgatgatgcttctgctctctccttgtggcaccccaatttgaagttgctccttgtcactcttggtgaaaatggttccagatactataccaagaatttccatggatcagtagatgctttccatgtcaacactgttgatacaactggagctggtgattccttcgttggagctctgttgggcaagattgttgatgatcaatccatactagaagatgaagcaaggttaagggaagtactcaaatttgcaaatgcatgtggagcaattacaactactaaaaagggagcaattcctgctcttcccacagaggctgatgttctcagcctgatcaaaggggaatagaaatttagtacaactaaatcgtttggttttctttttatatatatttttttacctttacaattttccgatggagttgctcccgatcaatttaagatgttttgtatgtcttggttttctttgtaatttgctttattttattttatttcctttctgcatcaacgttaagatcatatgatttcgcatgttttctttcaattttgaaagcagtggatgaataaaaatttgagttcacatcagctaggccca

SEQ ID NO: 1747 - DNA, 1289 bp, Vigna unguiculata
cttcaacctctgtacttcatcatcaaagttccatactcaaaaaccatggcctccaccaatgctcttcctcccaccggtagcggtctcgtcgtcagcttcggcgagatgctcatcgacttcgtccccaccgtctccggcgtctccctggccgaggccccgggtttcctcaaggctcccggaggtgctccagccaacgtcgccatcgccgtcgcaagactcggcggcaaggccgctttcgttggcaagctcggcgacgacgagttcggccacatgctcgccggaatcctcaaggagaacgacgtgagatccgacgggatcaacttcgaccagggcgcgcgcactgcgctcgcgttcgtgactctacgcgccgacggagagcgtgagttcatgttctacagaaaccccagcgccgacatgctcctcacgcctgaagatctcaaccttgaactcatcagatctgcaaaggtatttcattatggatcgataagtttgatcgtggagccatgcagatcagcacacctgaaggcaatggaggttgcgagggaagcagggtgtctgctgtcttacgatccaaacctccggctaccgttgtggccatcgcccgaggaagcgcgtcagcaaatactcagcatatgggagaaggctgatgtgataaaagtgagcgatgtggaacttgaattcctaaccggaagtgacaaaattgacgatgaatctgctctctcactgtggcatcccaatttgaagctgctccttgtcactcttggggaacacggttctaggtactataccaagaatttccatggatcagtggacgcttttcatgtcaacacagttgatacaactggcgcaggcgattccttcgtcggtgctctattatgcaagattgtcgatgatcaatccatacttgaagatgaagcaaggttaagggaagtgctgaagtttgcaaatgcgtgtggggcaattacaactactaaaaaaggagcaattcccgctcttcccacagaggctgatgctctcaacctgatcaaagaggcatagaaatttttagtgctattatcttttggttttctttatatatattgtcttcatcttttcacttttctgctcctcaagttgcttgctatcaacttaagatggattttgattcttgcttttctctgttttatttcccccctcattctgcattaacagtaatatcacatatgatttggggtttttgcaaatgatttctttcaaatttgatatatttggtcgaattaaaattttgagtgcttaaaaaaaaaaaaaaa

SEQ ID NO: 1748 - DNA, 1395 bp, Trifolium pratense
tctctctcttttctctcaaaccaaaccaaaccaatggcctcaaacacttccctcctccccgccaccggcgaaggtctaatcgtcagtttcggcgagatgctaatcgacttcgtccccaccgtctccggcgtctccctcgccgaagctcccggtttcctgaaagcacccggtggcgctccagctaacgtcgcgatcgccgtttcacgactcggcggtaaatcagccttcgtcggaaaactcggcgatgatgaattcggtcacatgctcgccgggatcttgaaagagaacaacgttagagccgatggtataaacttcgataaaggcgctcgtactgcactcgctttcgtcaccttacgcgctgatggagagcgtgagttcatgttttacagaaatcctagtgctgatatgcttcttacacctgaagatctcaatcttgaactcatcagatctgcaaaagtattccattatggatcaataagcttgatcgtggagccatgcagatccgcacatctgaaggcaatggaagttgcaaaggatgcagggtgcttactctcttatgatcctaacctccggctacctttgtggccctcaccagaggaagcccgtaagcaaatactcagtatatgggacaaggctgatttgatcaaggtcagtgatgtggagctggaatttctaactgggagtgataaaattgatgatgagtctgctctctccttgtggcaccctaatttgaagttgcttcttgtcactcttggagaaaatggttccagatactataccaagaatttcaaaggatcagtagatgctttccatgtcaacgctgttgacacaaccggtgccggtgattcctttgttggagctctgttgggcaagattgtagatgatcaatctatacttgaagatgaagcaaagttaagggaagtgctcaaatttgcaaatgcatgtggagcaattacaactactaaaaagggtgcaattccagctcttcccacagaagctgatgtcctcagccttatcaaagatgcatagaaatttagtacaaatatcattttgttttcttctttatatatttttgttcaactttacaattttctgctggagttttttactatcaatttaagatgggttttatcttttggaattttgttacttttattttatttcctttctgcatcaatgataagatcacatgatttttgttcgccaagcaatgttttcttccaaattttgaaagtagttgaataataaatttgggtcattgatatgtaacctgttggagtaataatagatagtgaaacagctatgtcactgactgattcaaccgaataatttagtctaatttctgaaacatttgcggagagtttgtccggtgatggctgtgatgctacggttttc

SEQ ID NO: 1749 - DNA, 1169 bp, Arachis hypogaea
tttgatctgtgttgtttaaatggcttcaagcaatggcatccccgccaccggaagcggtctcgtcgtcagcttcggcgagatgctcatcgacttcgttcccaccgtctccggcgtctccctcgctgaggctcctggattcctcaaggctcccggcggcgcccccgctaacgtggccatcgccgtcgccagactcggcggcaaggccgctttcgtcggcaagctcggcgatgacgagttcggtcacatgcttgccgggatcttgaaggaaaacggcgtcgtcgccgacgggatcacctttgaccagggcgcacgtacggcgttggcgttcgtaaccctacgcgccgacggggagcgtgaattcatgttctacagaaaccccagcgccgacatgctcctcaagcccgaagaactcaacctcgaactcatcagatctgcaaaggtgttccattatggttcaataagcttgatcgtggagccatgcagatcggcacacctgaaggcaatggaagtagccaaggacgccgggtgccttctctcctacgatccaaatctgaggctgccattgtggccatcggccgaggaagctcgcaagcaaatccgaagcatatgggagaaggctgatttgatcaaggtcagcgatgttgagctcgagttcctcactgaaagtgacaagattgatgatgaggctgccatgtccttgtggcaccccaacttgaagttgctccttgtcacccttggtgaacatggttctaggtactacaccaagaatttccatggatcagtagatgctttccatgtaaatacagttgatacaactggcgctggcgattcctttgtcggttctcttttggccaagattgttgacgaccaatccattcttgaggatgaagcaaggctaagatcagttctcacttattcaaatgcatgtggagcaatcaccaccaccaaaaagggagcaatccctgcccttcccaaggatgaagatgtgttggccctcatcaggggagcatagaatcttagtgccatcatttcgtttttgttttccttctaatttcgttcttttttaatttttctgttggacttgctggttggtctcgtcaattcaagaggggagagtttttctctcggttttctcttttaattttttgctgcttctctgcattgacgcc

SEQ ID NO: 1750 - DNA, 1559 bp, Trifolium pratense
cggcacgaggtgatcatagtaattttatcctaatccttttctttttttttggtaataatcctaatcctttttataatcactcattttctatataaactccaccgaatcaatcaatcacctctcaacctcaactatctcttctttctcactctctgaaattcaaatcactctcttttctctcacaccaaaccccatggcctcaaacacttccctcctccctgccaccggcgaaggtctcatcgtcagtttcggcgagatgctcatcgactttgtccccaccgtctccggcgtctccctagccgaggctcccggtttcctcaaagcccccggtggtgctcccgctaacgttgcgatcgccgtctcacgactcggcggtaaatccgccttcgtcggaaaactcggcgatgacgaattcggtcacatgctcgccgggatcttgaaagagaacaacgttagagccgatggtataaacttcgataaaggcgctcgtactgcactcgctttcgtcaccctacgcgccgacggagagcgtgaatttatgttctacaggaacccgagcgccgacatgcttcttacacctgaagatctcaatcttgaactcatcagatctgcaaaagtattccattatggatcaataagcttgatcgtggagccatgcagatccgcacatctgaaggcgatggatgttgcaaaggatgcaggttgcttactctcttatgatcctaacctccggctacctttgtggccctcaccagaggaagcccgtaagcaaatactcagtatatgggacaaggctgatttgatcaaggtcagtgatgtggagctggaatttctaactgggagtgataaaattgatgatgcttctgctctctccttgtggcaccccaatttgaagttgcttcttgtcactcttggtgaaaatggttccagatactataccaagaatttcaaaggatcagtagatgctttccatgtcaacgctgttgacacaactggtgctggtgattcctttgttggagctctgttgggcaagattgtagatgatcaatctatacttgaagatgaagcaaagttaagggaagtgctcaaatttgcaaatgcatgtggagcaattacaactactaaaaagggagcaattccagctcttcctacagaagctgatgtcctcagccttatcaaagatgcatagaaatttagtacaaatatcattttgttttcttctttatttttatttttttcaactttacaaaaatattctgctggagttttttcctatcaatttaagatgggttttatcttttggaattttgttacttttattttatttcctttctgcatcaatgataagatcacatgatttttgttcgccaagcaatgttttcttccaaattttgaaagtagttgaataataaatttgggtcattgatatgtaacctgttggagtaataatagatagtgaaacagctatgtcactgactgattcaaccgaataatttagtctaatttctgaaacatttgcggagagtttgtccggtgatggctgtgatgctacggttttc

SEQ ID NO: 1751 - DNA, 1324 bp, Medicago truncatula
attcacattcttccttcttactacgctattaaaatcaattcgctcttttttctctcacaacgatcccaaaccaatggcctccaacgcttccctcctccccgccaccggctccggtctcatcgtcagctttggcgagatgctcattgacttcgttccaaccgcttccggcgtctcccttgcagaagcacctggctttctcaaagctcccggtggcgcacccgctaacgttgcgatcgctgtttcacgactcggtggtaaatcagccttcgtcggaaaactcggtgatgatgaattcggtcacatgctcgccgggatcttgaaagaaaacaacgtgagaggggatggtatcaactttgacaaaggcgctcgtactgcactcgcgtttgttactctacgcgccgatggagagcgtgagttcatgttttacagaaatccgagtgctgacatgcttcttactcctgaagatctcaatcttgaactcatcagatctgcaaaagtattccattatggatcgataagtttgattgtggagccatgcagatcagcacatctgaaggcaatggaagttgccaaggatgctgggtgccttctctcttatgatccaaaccttaggttacctttgtggccttcaccagaggaagcccgtaagcaaattctgagtatatgggacaaggctgatctcatcaaggtcagtgatgtggagctggaatttttaactggaagtgataaaattgatgatgcttctgctctctccctgtggcaccccaatttgaagttacttcttgtaactcttggtgaaaatggttccagatattataccaagaatttcaaaggatcagtagatgctttccatgtcaacactgttgatacaactggtgctggtgattccttcgttggagctctgttgggcaagattgtagatgatcaatctatacttgaagatgaagcaaggttaagggaagtacttaagtttgcaaatgcatgtggagcaattactactaccaaaaagggagcaattccagctcttccaacagaagctgatgtccttagcctgatcaataaggcatagaaatttagtgcaaatatcgttttagttttcttttttatatattttttttcaccgttacatctttccgcctgagttgcttctatcaatttaagtcggttttttttttatctctttggttttctttgtttattttatttcctttctgcgtatcaacggtaatatcatatgattttggtttgccaaacaatgttttcttccaaattttgtaaccagtagttgaataaagatttgagttgagtccacattgactcggcc

SEQ ID NO: 1752 - DNA, 1129 bp, Trigonella foenum-graecum
tcaattcaaatcactctcttttcttttctctcacaaaccaatggccaccaccacatccctcctccccgccaccggctccggcctcatcgtcagtttcggcgagatgctcatcgacttcgtcccaacctcctccggcgtctccctcgccgaagctcccggcttcctcaaagcccccggtggcgctcctgccaacgtcgcaatcgccgtttcacgactcggcggtaaatccgccttcgtcggaaaactcggcgatgatgaattcggtcacatgctcgccgggatcttgaaagaaaacaacgtcagaggcgatggtatcaacttcgataaaggcgctcgtactgcactcgcgttcgttactctacgagccgatggagagcgtgagttcatgttctatagaaatccgagtgctgatatgcttcttacaccggaagatctcaatcttgaactcatcagatctgctaaagtattccattatggatcgataagcttgatcgtggagccatgcagatcagcacatctgaaggcgatggaagttgcgaaggatgctgggtgcttactctcttatgatccaaacctccggctacctttgtggccctcaccagaggaagcccgtaagcaaattctcagtatatgggacaaggctgatctcatcaaggtcagtgatgtggagctggaatttctaactggaagtgataaaattgatgatgcttctgctctctccctgtggcaccctaatttgaagttacttcttgtaactcttggtgaaaatggttccagatattataccaagaatttcaaaggatcagtagatgctttccatgtcaacactgttgatacaactggtgctggtgattccttcgttggagctctgttaggcaagattgtagatgatcaatccatacttgaagatgaagcaaggttaagggaagtacttaaatttgcaaatgcatgtggagcaattacaactaccaaaaagggagcaattccagctcttcccacagaagctgatgtccttagcctgatcaaagaggcatagaaatttagtgcaaatatcgttttggttttcttgttatgtatatttttttcaccttaccatttttccgctggagtttcttcttatcaatttaag

SEQ ID NO: 1753 - DNA, 1283 bp, Glycine max
ctctctcatcttctacagcattcttctgcaattcaaatcaaattttcaaaccatggcttcctccaccaacgctcttcctcccaccggcaacggcctcatcgtgagcttcggcgagatgctcatcgatttcgtccccaccgtctccggcgtgtcccttgcggaggctccgggcttcctcaaggcccccggcggcgcccccgccaacgtcgccatcgccgtcgcgaggctcggcggaaaggcggcgttcgtcggaaagctcggcgacgacgagttcgggcacatgctggctggaatcctgaaggagaacgacgtgcgatccgacgggatcaacttcgaccagggcgcgcgcaccgcgctggcgttcgtgaccctacgcgccgacggagagcgtgagttcatgttctacagaaaccccagcgccgacatgctcctcacgcccgaagatctcaatctcgaactcatcagatctgcaaaagtattccattatggatcgataagcttgatcgtggagccatgcagatcagcacacctgaaggcaatggaagttgccagggaagcaggatgcttgctctcttatgacccaaacctgcggctacccttgtggccctccgccgaggaagcacgtcagcaaatactcagcatatgggacaaggctgatgtaatcaaggtcagtgatgtggaactggaattcctaaccggaagtgacaaaattgatgatgcatctgctctctccctgtggcaccccaatttgaagttgctccttgtcactcttggcgaacatggctctagatactataccaagaatttccatggatcagtggaggcttttcatgtcagcacggtcgacacaactggcgctggtgattcctttgttggtgctctattaagcaagattgtcgatgatcaatccgtacttgaagatgaagcaaggttaagggaagtactcaagtttgcaaatgcgtgtggagcaattacaactactaaaaagggagcaattcctgctcttcccacagaggctgatgccctcaacctgatcaaagaggcatagaaatttaatgctagtagcttttggttttctttatatatatgtcttcatccttttcctttcgcgttggacttgcttgctatcaacttcagatggattttgtttcttggttttctttgttttatttacccctcattctgcattaacggtaatatcatatgatttggggttttgccaaatgatttctttcaaattctgagattgagattattggttgaatgaaaatttgagtccttat

SEQ ID NO: 1754 - DNA, 1300 bp, Trifolium pratense
ctctcccaaaactctctacaaaaccaaaactctctctctttgtcaccaatccccattcacttttcaaacttcaacaatggcgtcaagcaatgacatcccaacaacaggcacaggcctaatcgtaagcttcggcgagatgctcatcgatttcgtcccaacagcttccggcgtatcactcgccgaagcaccaggtttcctcaaagcccccggcggtgcaccggcaaacgttgcaatcgcgatcaccagactcggaggtaaatcagccttcgtcggtaaactcggtgacgatgaattcggtcacatgctcgccgggatcttgaaagaaaacggcgttaaagctgaaggtataacgtttgatgaaggtgcaagaactgctttggcttttgttactctacgcgctgatggagagcgtgagtttatgttttatagaaatcctagtgctgacatgcttcttaaacctgaagaactcaacctcgaactcatcagatctgcaaaagttttccactatggatcaataagcttgatcgttgagccatgcagatcagcacacttgaaggcactggaagtggccaaagaggctggttgccttctatcctatgatccaaatctccgcctacccttgtggccctcggccgatgaagctcgcaagcaaatactgagtatatgggaaaaggctgatttgatcaaggttagtgataatgagctggagttcctgactggaagtgacaaaattgatgatgctacagctttgacattatggcaccccaatttgaagttgcttcttgtcactcttggtgaacatggcgcaagatactacaccaagaatttccatggaacagtagaagcattccatgtcaatacagttgatacaaccggtgccggtgattcctttgttggtgctctactggccaagattgttgatgatcagtccatactagaagatgaaccaaggttaagagcagtacttaagtttgcaaatgcatgtggagcaatcacaactactaaaaagggagcaattcctgctcttcccaacgaggaggatgcactgaaactgctcaatgcatagatttctttaacatattttgtttttcttacaatcttgtttcaccctttcgttggtgttgcttttaatcaatttaagagggaatttgtctctaattttctttgtttttcccctttattttctgaatccacagcaaagacatatatgctgagtttggcaaaataatgtttcttgagttttgatatgagctattgaatgaaaatttgattaaggagtgttgatgcttcttaattcgta

SEQ ID NO: 1755 - DNA, 1259 bp, Trifolium pratense
ttcaccaatccccattcacttttcaaacttcaacaatggcgtcaagcaatgacatcccaacaacaggcacaggcttaatcgtaagcttcggtgagatgctcatcgactttgtcccaacagcttccggtgtatcactcgccgaagcaccaggtttcctcaaagcccccggcggtgcaccggcaaacgttgcaatcgcaatcaccagactcggtggtaaatcagccttcgtcggtaaactcggagacgatgaattcggtcacatgctcgccgggatcttgaaagaaaacggcgttaaagatgaaggtataacgtttgatgaaggtgcacgaactgctttggcttttgttactctacgcgctgatggagagcgtgagtttatgttttatagaaatccaagtgctgacatgcttcttaaacctgaagaactcaacctcgaactcatcagatctgcaaaagttttccactatggatcaataagcttgatcgttgagccatgcagatcagcacacttgaaggcactggaagtggccaaagaggctggctgccttctatcctatgatccaaatctccgcctacccttgtggccctcggccgatgaagctcgcaagcaaatactgagcatatgggaaaaggctgatttgatcaaggttagtgataatgagctggagttcctgactggaagtgacaaaattgatgatgctactgctttgacattgtggcaccccaatttgaagttgcttcttgtcactcttggtgaacatggcgcaagatactacaccaagaatttccatggaacagtagaagcattccatgtcaatacagttgatacaaccggtgccggtgattcctttgttggtgctctactggccaagattgttgatgatcagtccatactagaagatgaaccaaggttaagagcagtacttaagtttgcaaatgcatgtggagcaatcacaactactaaaaagggagcaattcctgctcttcccaacgaggaggatgcactgaaactgctcaatgcatagatttctttaacatattttgtttttcttacaatcttgtttcaccctttcgttggtgttgcttttaatcaatttaagagggaatttgtctctaattttctttgtttttcccctttattttctgaatccacagcaaagacatatatgctgagtttggcaaaataatgtttcttgagttttgatatgagctattgaatgaaaatttgattcaggagtgttgatgcttcttaattcgta

SEQ ID NO: 1756 - DNA, 1374 bp, Trifolium pratense
ctcccaagtcccaacccttttctatataaatactagtaaataaattaccaccaaccccattcttatatctctctcccaaaacacacactctctttctctctgtttttctcaccaatccccattcacttttcaaacttcaacacattcaacaatggcatcaagcaatgacatcccaacaacaggcaaaggtctaatcgtaagcttcggcgagatgctaatcgacttcgttccaacagcttccggcgtgtcactcgccgaagcaccaggctttctgaaagctcccggaggtgcaccggcaaacgttgcaatcgccatcacgagactcggtggtaattcagctttcgtcggtaaacttggagacgatgaattcggtcacatgctcgctgggatcttgaaagaaaacggtgttaaagatgaagggataacttttgatgaaggtgcaagaactgctttggcttttgttactctacgcgctgatggagagcgtgagtttatgttttatagaaatcctagtgctgacatgcttcttaaacctgaagaacttaaccttgaactcatcagatctgcaaaagttttccattatggatcaataagcttgatcgttgagccatgcagatcagcacacttgaaggcactggaagtggccaaagaggctggttgccttttatcctatgatccaaacctccgtctaccattgtggccctcagccgatgaagctcgcaagcaaatactgagtatatgggaaaaggctgatttgatcaaggttagtgataatgagctggagttcttgactggaagtgacaaaattgatgatgagactgctttgacattgtggcaccccaatttgaagttgctccttgtcactcttggtgaacatggcgcaagatactacaccaagaatttccatggaacagtagaagcattccatgtcaatacagttgatacaaccggtgccggtgattcctttgttggtgctctattggccaagattgttgatgatcagtccatactagaagatgaaccaaggttaagagcagtacttaagtttgcaaatgcatgtggagcaatcacaactactaaaaagggagcaattcctgctcttcctaaggaggaggatgcactcaacctgctcaatgcatagatttctttaacatattttgttttctttgtttcaccttttcgttggtgttgcttttactcaatctaagagggaatttgtctctaattttctttgtttcttccctttattttctgaattgacagcaaaaacatatgctgagtttggcaaaataatgtttcttgaattttgatatgagctattgaatgaaaatttgattaaggagtgttgatgcttcttaattcgtaataaaaaaa

SEQ ID NO: 1757 - DNA, 1366 bp, Cajanus cajan
tctcaaccttgcattcttcttctactctgcaattcattcattccaaacaccaaaaccatggcccttcctcccaccggcgccggcctcatcgtcagcttcggcgagatgctcatcgacttcgtacccaccgtctccggcgtctccctcgccgaggctccgggcttcctcaaggctcccggcggcgcccccgccaacgtcgccatcgccgtcgccaggctcggcggaaaagccgccttcatcggcaagctgggcgacgacgagttcgggcagatgctggccggaatcctccaggagaacaacgtgaaagccgacggcatcaagttcgacgagggcgcgcgcaccgcactggccttcgtgaccctacgcgccgacggagagcgtgagttcatgttctacagaaaccccagcgccgacatgcttctcacgccggaagatctcaacctcgaactcatcagatcggcaaaagtattccactatggatcgataagcttgatcgtggagccatgcagatcggcacacttgaaggcgatggaagttgcgaaggaagcagggtgcctgctctcttatgacccaaacttgaggctaccattgtggccctcagccgaggaagcgcgtcagcaaatactaagcatatgggacaaggctgatgtgatcaaggtgagcgacgtggaactcgaattcctaaccggaagtgacagaattgatgatgcatctgctctctctttgtggcaccccaatttgaagttactccttgttactcttggggaacatggttctaggtactataccaagaatttccatggatcggtggaggcttttcatgtcaacacagttgatacaaccggcgctggtgattcgtatgttggtgctctattaagcaagattgtcgatgatcaatccatacttgaagatgaaccaaggttaagggaagtgctaaagtttgcaaatgcatgtggagcaattacaactactaaaaagggagcaattcccgcacttcccacagaggctgatgccctcaatctgatcaacgaggcatagaaatttagtgctactatcttttgcttttcttttttatatatatccttttcacttttccgttggagttgcttgctatctactgaagatgaattttatttctcggttttccttcttgtttcattgtacccccattctgcattaacggtaataacatatgatttggggtttttccaaattttgagatgattgcttgaatgaaaatttgagtccttactagctcgcccagcaattaatttcttcaaattgttgtctttttattattaaaagcttgttttatcatgtaatttttatatttttataaatcaaattaaataccagatcaatcaaa

SEQ ID NO: 1758 - DNA, 1352 bp, Prunus persica
ctctctcttaatatttccctcaccatccaccaaacctttctctctcttctctctctgctctctctctcttttaacagctatggctaacaatggcgtaccggcgaccggaaaaggcctgatcgtgagttttggcgagatgctgatcgactttgtgcccactgaatcgggcgtttcgctggcggaggctccgggcttcctcaaggcccccggtggtgcccctgctaacgtggcgattgctgtggcccgcctcggcgggaaggcggcgttcgtcggaaaactcggcgacgacgagttcggccacatgctcgccggcatcctgaagcaatacggcgtcaccggagagggcatcctcttcgatcagggcgcccgcaccgccctggccttcgtgaccctacgcgccgacggagagcgcgagttcatgttctaccgcaaccctagcgccgatatgctgctcaagcccgacgagctcaacttggagctcatcaaatccgccaaggtgttccactatggatccataagcttgattgtggagccatgcagatcagcccatctaaaggcaatggaggtggccaaagatgccggtgcattactctcctacgacccgaacctgcggctgccgctgtggccgtctgcggaggaggcacgcaagcagattatgagcatatgggagaaggctgatttgatcaagattagcgatgtggagcttgagttcctcacaggtaaccctaaaattgatgatgagaatgcattgactctgtggaaggacaacttgaagctcctcctcgtcactcttggtgagaacggttgcagatactacaccaagcatttccggggatctgtggaagccttccatgtcaaaacagtggacactactggtgctggtgattcatttgtgggtgccctccttgcaaagattgttgatgaccaatctattcttgaagatgagcaaaggttgagaggggtgctgaaatttgcaaatgcatgtggagccattacaaccaccaagaagggagcaatccctgcccttcccagcgagtctgaagctttcaccctaatcaagggagcttagaagaagatctcaaaacaaaaatacttttgctctcttttttttcttcttctttttaactttgtaggacgtctgtttcaatttcctttgcttattgattggagaggggttttccaacctcagtttctgctttccttatctttttgcccctgcgtgttatgatggaaaattggcatcgctttatgcattgctgaataagtatataatttcctcacacattttcagtttatttagtttttggatgttagctattagtattattttattattctatttgttattacaa

SEQ ID NO: 1759 - DNA, 1115 bp, Humulus lupulus
accctctcatatatcattaatcattctccttctctcactttctgaaaacatttttcattccaatggcgtcctctaacaatggcgttccagcaaccggcaagggtctgatcgtcagcttcggtgagatgcttatcgacttcgtacccaccgtctccggtgtctctctcgccgaggctcccgggttcctcaaagcccccggcggcgccccggccaacgtcgccatcgccgtgaccaggctaggtggcaaagctgccttcgttggaaaactcggagacgacgagttcggacacatgctagccgggatcttgaaagagaacggtgtctccgccgaaggaatcaacttcgatcaaggtgcccgtaccgccttggccttcgtcactctcaaagccgacggtgagcgcgagttcatgttctacagaaaccctagcgccgacatgctccttaagccagaggagctcaatcttgagttgatcaaatcggctaaagtgttccactatgggtctatcagcttgatcgtagagccatgccgatcggcgcacatgaaagcgatggaggcggctaaggaggccggggccctgctctcttacgaccccaatctacggttgcccttgtggccatcagaggatgaggcgcgtgagcagattctgagcatctgggacaaggcggacgtcatcaaggtcagcgatgtcgagcttgagttcctaaccaaaagtaacaaaatcgacgacgcctccgccatgtcgttatggcaccccaacctcaagctcctcctcgtcactcttggcgagcatggctgcagatactacaccaagaatttccatgggtctgtggatgctttccatgtcaaagcagtggacacaactggtgctggtgattcatttgttggtgccttacttacgaagattgttgatgaccaatccatcattgaggatgaggcaaggttgaagcaggttctaaaatttgcaaatgcatgtggagccattaccaccaccaagaagggagcaatcccagctcttcccactgagactgaggtcctcagcctggtcaaaggtgtataagagagggggggaaaattttctgttattagtttttgcatgtttttgtttttgtctctt

SEQ ID NO: 1760 - DNA, 1316 bp, Citrus clementina
ctattgattttatttctcttcatagactctctctccattcaatacacatcgtttcgatttttgtacaaatggctaccaacggcgccgtttcatcctcctcaagcctgatcgtgtccttcggtgagatgctcatcgacttcgtcccgacggtctccggcgtctccctcgccgaggcccccggattcctcaaggcccccggcggcgcccccgccaacgtcgccatagccgtagctcgcctcggcggcaaggcagccttcgtcggcaagctcggcgacgacgagttcggtcacatgctcgctgggatcttgaaggagaacggagtcagcgctgacggcatcaactttgaccagggtgccagaactgcccttgcattcgtgaccctgcgggctgacggcgagcgcgagttcatgttttacagaaaccccagcgctgatatgctcttgagacccgacgagcttaatcttgagctgatcagatctgccaaagttttccactatgggtcaataagcctgatagtggagccatgccgatcagcgcacttggaggcaatgaaagcagccaaggaagcaggagcccttctctcatacgaccccaacctccggctaccgttgtggccctcgccggaggaggcgcgcgagcagataatgagcatctgggacaaggccgaggtaatcaaagtcagtgatgtggagcttgaattcctcaccgggagtgacaagattgatgatgaatcagcattgtcgctttggcatcccaacttgaaactccttttggtcacccttggtgagcatggctgtagatactacactaagagtttcaaaggagcagtggatgcttttcatgtgaacacagtagatacaaccggcgctggtgatgcatttgttggtgctcttttagggaagcttgttgatgaccaatctgttcttgaggatgaaacaaggttgcgggagatattgaaatttgcaaatgcctgtggagccatcactaccaccaagaagggagcaattccagctctacccacagagtctgaagctctcaacttactcaaaggagcgtaataataaacaaaattattagttccaatttttttttttttgtttgtattttgaattttctttttgtttgtattttgaattttctttttgtttctacggaagttgctttgaattcaatgaaaagaagtttcttctgtattattattatttttcaatatttaggttacttgtttttccctatttgtaatgatcgaagacttgagctttgaactttaaaggttgctgctctgctttagcgaataaaactatcgtttctcgtga

SEQ ID NO: 1761 - DNA, 1238 bp, Castanea mollissima
ccttcgctttctctctctaaaaaagtctctcagcgatggctcccaatggcgttgttgaaaagaccggagccggcttgatcgtctcgttcggcgagatgctcatcgacttcgtcccgaccgtgtccggcgtgtcgctcgccgaggcaccgggatttctcaaggctcccggcggcgctccggccaacgtggcgatcgccgtctcgaggctcggcgggaaatcggcgttcgtcgggaaactcggcgacgacgagttcggacacatgctggccggaattctgagggaaaacggcgtcgtagacgaagggatcaacttcgacaagggcgcgcgcacggcgctcgcgttcgtgactctacgcgccgacggagagcgcgagttcatgttttacagaaaccctagcgccgatatgctcctcactcccgacgaactcaatcttgatctcattcgatccgccaaagtttttcactatggatccataagcttgattgtggagccatgcagaacagcacacctaaaggcaatggaggtggccaaagatgctggtctcctgctctcctatgaccccaacctccggctaccattgtggccatcgccggaggaggcccgtgagcagattaagagcatttgggataaggctgatttgatcaaagttagtgatgtggagcttgagttcctcacagggagtaacaagattgatgacgaatctgccatgacactgtggcaccccaacttgaagctcctccttgtcactcttggtgacttgggctgtagatactataccaagaacttccatggagaggtagaggctttccgtgtcaacacagtggatacaactggtgctggagattcatttgttggtgccctactctgcaagatcgttgatgaccaatccatactagaagatgaaccaagattgagggccgttctcaaattcgcaaatgcatgtggagccattacaactaccaaaaagggagcaatccctgcccttccaaccgagtctgatgccctcagcctgattaaaggaggagcttaaaagacttggttgtgcttcattgttccaaccacttttttctttggagcactttttttttttttttttttaaatgcgtttgtaatttttgcgtaggattgcttctttttttctttttttcagttcaactaaaaagggtttgaaccctctcatttttactcctttttccctgcctgtaatgatgggaaggcttgtgtttcgaggcattaa

SEQ ID NO: 1762 - DNA, 1312 bp, Nicotiana benthamiana
accaccttctatatatatatatatatatacctccttcgatcttctcttcaatcttctcctctcctctctatcttttcttctttattgtatagatatatactttacatttatacatatattctctctattcatcgtcgctatggcagctaacggcgttagttctggtttaattgtgagcttcggcgagatgttgatcgatttcgtgccgacggtctccggtgtatcccttgccgaggctccgggtttcttgaaggctcccggaggtgcaccggcaaacgtcgccatcgcagtgactaggcttgggggaaagtcggcgttcgtcgggaaactcggcgacgatgagtttggccacatgctcgccgggatactaaaacaaaacggcgtccaagcggacgggatcaactttgacaagggcgcgagaacggcgttggcattcgtgaccctacgcgccgacggagagcgtgagttcatgttctacaggaatcccagtgccgatatgttgctcactcccggcgagttgaatcttgatgttattagatctgctaaggtgttccactacggttcgataagtttgatagtggagccatgcagatcagcacatttgaaggcgatggaagtggcaaaggaggcaggggcgctgctctcttatgacccaaacctccgattgccgctgtggccgtcggcagaggaggcgaggaagcaaatcaagagcatctgggacaaggcagatgtgattaaggtgagtgatgtcgagctggaattcctaactggaagtgacaagattgatgacgaatctgccatgtccttatggcatcccaatttgaagctcctcttggtcacccttggcgagaaaggatgcaattattacaccaagaatttccatggaggcgttgaggcattccatgtgaagactgttgacacgaccggagctggtgattcttttgttggtgccctcctaaccaagattgttgatgaccaatctattcttgaggatgaagcaaggctgaaggaagtactaaggtttgcatgtgcatgtggagcaatcacaacaaccaagaaaggagcaatcccagctcttcctactgaatctgaagccctcactttgcttaagggaggagcataggacgaagatgattttacccatttaattctttttaatcgtgatatatttcggccctttacgagttttgtcctttcaatcaatcaaagtatttcatttttcactttcggggtttcggattttagtggtttcttgtagtggtgaaagacaatgcattaaggcacttaataaactaagcttcttcctattgat

SEQ ID NO: 1763 - DNA, 1196 bp, Tabernaemontana elegans
aagtcttgactttcactctctctatatctatattttctatacatatactattatcttattagtttttctcataatggcttctcttgcaaatggtggtgattcaagtttaattgtaagttttggtgagatgctgatcgattttgtgcctacagtttctggggtgtcgctggcggaagcacccggcttcttgaaagctccgggtggtgctcctgcaaacgtggcgatcgcggtctccaggttgggtggaaaggcttcttttgtcggcaagctcggtgacgatgaatttggccacatgcttgccggaatactgaagcaaaacggagtttccgccgagggcatcaccttcgacaccggtgccagaactgctttggcgttcgtgactctacgcgccgacggtgaacgtgaattcatgttttacagaaatcctagtgccgatatgctcttgactcccgatgagttgaatctcgaactcatcagatctgcaaaagttttccattatggttcaatcagcttgatagttgaaccatgcagatcagcacatctaaaggcaatggaggtggcaaaggacgctggagctttactgtcatatgacccgaacctccggttgccactctggccatcagcagagcaagctcgtgagcagatcaagagcatctgggataaagcagatatcatcaaggtcagtgatgtggagctggagttcctcactggcagtgacaagattgacgatgagtctgcactgtccctttggcaccccaatttgaagcttctcttagtgacccttggagagaagggctgtagatattattccaagagtttttgtggatcggtagatgctttccatgtgaatactgttgatacaacaggcgccggtgattcctttgtaggagccctcctgaacaaaattgttgatgaccaggctatattagaggatgagccaaggttgagggaagtactgagatttgcttgtgcttgtggagccattacaacgaccaaaaagggtgcaatccctgcacttcccacagaatctgaagcccttgcccttcttaaccagggaaagtgagaggcttttagttttctgtttcgatattgttaattcaaagttttgcttgcacttgaattagcgtgtaggcttctcatttcttgtctttggatttttgcttgtttgttttgttatggaaggtcccatctaaaaa

SEQ ID NO: 1764 - DNA, 1232 bp, Vinca minor
cttaacttttttctctgtgtcaattctagtattagattagctatatatagtcaattccatataatggcttctgttgcaaatggtgatagttcacgtttgattgtaagtttcggtgagatgttaattgatttcgttcccacagtttccggtgtatctctggcggaagctccgggattcttgaaggctcccggcggtgctccggcaaacgttgctatcgccgtttccagattgggcggaaaagccgcctttgtcggtaaactcggtgatgatgagtttggacatatgctcgccggaatacttaaggagaacggagttggcgccgaaggtatcaatttcgataccggggcaagaactgctttggctttcgtgactctacgcgccgacggtgaacgtgaatttatgttttatagaaatcccagtgctgatatgctattgactccagatgagttgaatctcgaactcatcagatctgcaaaagttttccactacggttcaattagcttgatagttgaaccatgcagatcagcacatctaaaggcaatggaagcggcaaaggacgccggagctttactttcatatgaccctaacctcaggttgccactctggccatctgccgaggaagctcgcgagcagatcaagagtatctgggataaggcagatatcatcaaagtcagtgatgtggagcttgagttcctcactggtagtgacaagattgatgatgaatctgcaatgtccctttggcaccccaatttgaagcttctcctagtgacccttggggagaagggttgtagatattattctaagagtttccgcggatccgtagatgcttttcatgtgaatactgtcgataccactggtgccggcgattcctttgtaggagccctcttggctaaaattgtcgatgatcaggctattttggaggatgaaccaaggttgagggaagtacttagattttcttgtgcttgtggagccattacaacaaccaagaagggagcaattcctgcacttcctaccgaatctgaagttcttgcccttcttaacaagggaaattgataggttttgttgttttctgtattagtgttgttgatcaaagttttgcttggacttgaattagtgttgtaagcctcagatctctcctttttttggattttcgtcttgctttctttgcttttctttcatgtaatgatggaaattctcatccaaaatttagattattataaataaacttagta

SEQ ID NO: 1765 - DNA, 1177 bp, Amsonia hubrichtii
tgtagtcatcgataatggctgctgttgcaaatggtagtagctcaggtttgattgtaagttttggtgagatgttgattgattttgtgcccacagtttccggggtatcgctggcggaagcaccgggctttttaaaggctccgggcggtgctccagcaaacgtggcgatcgccgtctccaggctgggtggaaaggctgcctttgtcggcaaacttggtgatgatgagtttggccacatgctcgccggaatactcaagcagaatggagtttccgccgacggcatcaactttgataccggtgccagaactgctttggcattcgtcactctacgcgccgatggtgaacgtgaattcatgttttacagaaatcctagtgctgatatgctattgactcccgatgagttgaatctcgaactcatcagatctgcaaaagttttccattatggttcaatcagcttgatagttgagccatgcagatccgcacatctaaaggcaatggaggttgcaaaggatgctggagctttactttcatatgacccaaatctccggttgccactctggccatctgcaaaagaagctcgtgagcagatcatgagcatttgggataaagcagatatcatcaaggtcagtgacgtggagctggaattcctcactggtagtgacaagattgatgatgagtctgcattgtccctttggcaccccaatttgaagcttctcttagttacccttggagagaagggttgtaaatactattctaagaattttcatggatccgtagacgcttttcatgtgaataccgtggatacaactggggctggtgattcttttgtaggagccctactgaataaaattgttgatgaccaggcaatattggaggatgagccaaggttgaaggaagctctaagattcgcttgtgcctgtggagccattacaacgaccaaaaagggagcaatccctgcacttcctaccgaatctgaagcccttgcccttattaacaagggaaattgataggttttttagttttctgttatgataattgtcaaatcaaagttttgcttgcacaagaattagagtgtaggcttcttctgatctctctcgtctttgggttttcgcatgtttaccttttgtttattgtaatgatgccaatttttataaatgaacttctcaagtcttggtatgct

SEQ ID NO: 1766 - DNA, 1547 bp, Prunus mume
cctcacaatccatattatatatatagattatcataatttaattttaattttattagaaatcataatccttcctttttaaggcttcctctcataatcataattcataatccattttattttcggatcatcctcttcctcggtttctcccactcctataaatactccccccaccttccattcccaatctctctctctctctctctctctctctcaatatttccctcaccatccaccaaacctctctctctctctctctctctctctctctctctctttaacagctatgactaacaatggcgtaccggcgaccggaaaaggcctgatcgtgagtttcggcgagatgcttatcgactttgtgcccaccgaatcgggcgtttcgctggctgaggctccgggcttcctcaaggcccccggtggtgcccccgccaacgtggcgattgctgtggcccgcctcggtgggaaggcggcgttcgtcggaaaactcggcgacgacgagttcggccacatgctcgccggcatcctgaaacaatacggcgtcaccggagagggcatcctcttcgatcagggtgcccgcaccgccctggccttcgtgaccctacgcgccgacggagagcgtgagttcatgttctaccgcaaccctagcgccgatatgctgctcaagcccgacgagctcaacttcgagctcatcaaatccgccaaggtgttccactatggatccataagcttgattgtggagccatgcagatcagcccatctaaaggcaatggaggtggccaaagatgccggtgcattgctctcctacgacccgaacctgcggctgccgctgtggccgtctgcggaggaggcacgcaagcagatcatgagcatatgggagaaggctgatgtgatcaaggttagcgatgtggagcttgagttcctcacaggtagccctaaaattgatgatgagaatgcattgactctgtggaaggacaacttgaagctcctcctcgtcactcttggtgagaacggttgcagatactacaccaagcatttccggggatccgtggaagccttccatgtgaaagcagtggacactactggtgctggtgattcatttgtgggtgctctccttgcaaagattgttgatgaccaatctattcttgaagatgagcagaggttgagaggggtactgaaatttgcaaatgcatgtggagccattacaaccaccaagaagggagcaatccctgcccttcccagcgagtctgaagccttcaccctaatcaaggaagcttagaagaagaagatctcaaaacaaaaatacttttgctctcttattttttttcttctttttaactttgtaggacctctgtttcaatttcctttgcttattgattggagaggggttttccaacctctgtttcttttttccttatctttttgcctctgcgtgttatgatggaaaattggcatcgctgaataagtacataatttcctcacacattttcagtttatttagtttttggatgttagctattagtattattttattattctatttgttattataa

SEQ ID NO: 1767 - DNA, 1283 bp, Theobroma cacao
ctcttataactctctattctcacttgtctccttagaatcataaatctttttgccttttctcttttctcgaagttatggcaccaatcggagtcccttccgacaagagcctcattgtgagcttcggtgagatgctcatcgactttgtccccaccgaatccggtgtttctttagccgaggctccgggatttctcaaagcccccggcggagccccagccaacgtggcgatcgccgtcgctagacttggaggcaaagcctccttcgtcggaaaactcggagacgacgagttcggtcacatgctcgccgatattctcaagaaaaacggagtctctgaggatgggatcttgtttgaccaaggcgctaggaccgctcttgcgttcgtgactctacgcgccgatggagagcgtgagttcatgttttacaggaatcctagtgccgatatgctgttgaagccggaggaactgaatcttgatcttatcagatcttccaaagtgtttcactatggatccataagtttgatcgtggagccatgcagatcggctcatttaaaggcaatggaagtggccaagcaatcaggtgctttgctctcatatgatccaaaccttcgcctgccactttggccttcagctgatgaggcaaggaaacagattttgtccatctgggataaggcagatgttatcaaggtaagtgatgttgagctagagttcctcaccggtagcgacaaaatcgatgatgaaactgccatgaaactctggcaccccaacttgacgctactcttggtcactcttggtgaaaagggtagcagatactacaccaagaatttccatggttcagtggatgcttttcatgtgaatactgtggatacaactggcgctggggactccttcgtcggtgcattgctatgcaagattgttgaggacccaaccatacttgagaatgaatcaaaattgagggaagtactgaaattcgcaaatgcatgtggagccatcacgacaaccaaaaagggagcaatccctgctcttccaaccgaggctgatgcccttgccttaatcaaaggagcttaggaaaatttaaataaaataattggacatcgttttgccttttccattcctttcttttctttctttttttttttaatttctattttattttcaaagagggttttcaaagatttttctccctcttcttttatctttcatattccccggccctttccctgtttgctgcgtgtaaggatggaagactttgtgcttttaaggggattaggaataattttttttttcttg

SEQ ID NO: 1768 - DNA, 1180 bp, Catharanthus roseus
tctctagctttctttgttcttctctttctcttccccttcgatatcagtatacagatttttttaatataatatactaatacgaatatacaacgtagttgttcataatggctgctgttgccaatggtggaagttcaagtttgattgttagttttggtgagatgttgattgattttgtgccaacagtttccggggtgtctctggcggaagcacccggattcttaaaggctccgggcggtgctccggcaaacgtggcgatcgcggtatccaggttgggcggaaaggctgccttcgtcggcaaactcggcgatgatgagtttggtcacatgctcgctggaatactcaaacagaacggagttcgagctgacggaatcaactttgacaaaggtgcaagaactgctttggcattcgtgactctacgcgccgacggtgaacgggaatttatgttttacagaaatcctagtgctgatatgctattgactcccgacgagttgaatctcgaactcatcagatctgcaaaagtttttcattatggttcaatcagcttgatcgttgagccatgcagatcagctcatatgaaggcgatggaggcggcaaaggaagctggagctttactttcatatgacccaaacctcaggttgccactatggccatctgcagaagaagctcgtgagcagatcatgagcatctgggacaaggcagatatcatcaaggtcagtgatgtagaacttgagttcctcacaggcagtgacaagattgatgatgagtctgcaatgtccctttggcaccccaatttgaagcttcttttggtaacccttggggagaagggttgtaattattatactaagaattttcatggatccgtaagtgcttttcatgtgaatactgtcgatacaactggtgctggtgactcctttgttggagctctcttgaacaaaattgttgatgaccaggctatcttggaggacgagccaaggttgagggaagtactcagatttgcttgtgcttgtggagccattacaaccaccaaaaagggggcaatccctgcacttcctactgaagctgaagttcttacccttcttaacaagggaaattgatagagggcttgcaattttctgttttgacattgttgattcaaaggtttgctttcaattgaatcagtgtgtaggcttttttttttttt

SEQ ID NO: 1769 - DNA, 1153 bp, Ipomoea nil
gacctctctctatctctctctacatctatatatatatatatatatacgtgctccgtatatttatatatatacacatttctgtacgtatataatctttgtatatcgtcgtcatggctgtgaacggtggaacttgttcaaatttgatcgtcagcttcggggagatgctgatcgacttcgtgccgacagtttccggcgtgtctctggcggaggcgcccggtttcctgaaggctccgggcggtgctccggccaacgtggctatagcggttacgaggctgggcgggaaggccgcgttcgtcgggaaactcggcgacgacgagttcgggcacatgctggccggaatcctgaaggagaatggggtacgcgccgacgggatcaacttcgacaagggcgccaggacggccctggccttcgtgacgctacgcgccgacggggagcgcgagttcatgttctacaggaaccccagcgccgatatgctgttgaccccggacgagttgaatctggagctcattagatctgccaaggttttccactacggatcaataagcttgattgttgagccatgcagatcagctcatatgaaggcaatggaagctgcaaaagacgccggagctttgctttcctatgaccccaacctcaggctgccattgtggccatcccccgaggaggcacgtgagcagatcatgagcatatgggataaggcagatgtgatcaaggtcagtgacgttgagctggaattccttactggctgtgacaagattgatgatgagtccgctttgtccctgtggcaccccaacctgaaactcctcctcgtgacccttggtgagaagggttgcagatattacaccaagagcttcaagggatctgttgaagcttttcacgtcaagacagttgacacaacgggagctggtgattcctttgtcggtgcccttttgtgcaagattgttgatgactgctccataattgaggatgaggcgagattgaaggaagtacttcgatttgcatgtgcttgtggagccatcacaactaccaaaaaaggagcaatccctgcccttccttgcgaagcagatgccctcgctcttctcaactgaacttaagcatcatgcctttccattgattttcttaccagcactagttatattaggttctgttcatc

SEQ ID NO: 1770 - DNA, 1193 bp, Lupinus angustifolius
tgctcatcgacttcgtccccaccgtctccggcgtctccctagctgaggcaccaggattcctcaaagctcccggcggtgctccggcgaacgttgccatcgccgtcgcaaggatcggtggcaaagctgccttcgtcggaaaactcggagacgatgagttcggtcacatgctggcggggatcttgaaggaaaacggcgtacgcgccgatggtattacatttgatacgggtgcacgtactgctttggcgttcgtgactctacgcgctgacggggagcgtgagtttatgttctataggaacccgagtgctgacatgttgcttaagcctgaagagcttaaccttgaactcatcagatctgcaaaagttttccactatggatcaataagtttgatagtggagccatgcagatcagcacacttgaaagccatggaagttgccaaagaagctggttgtctcctctcctatgatccaaacctgcgtctaccattgtggccatcacctgaagaagctcgtaaacaaatactcagtatatgggacaaagctgatttaatcaaggtcagtgatgtggagcttgaattcctcactggaagtgacaaaattgatgatgcttctgctttgtctttgtggcaccccaacttgaagttactccttgtcactgttggtgaacatggttctaaatactataccaagaatttccatggatcagtagatgcttttcatgtcaagacaattgatacaacaggagctggtgattcctttgttggttctctattggccaagattgttgatgatcaatccatacttgaagatgaaccaaggttaagagaggtgctcaagtttgcaaatgcatgtggagcaattacaactactaaaaagggagcaatccctgctcttccaacagagtctgatgtcctcaatctgatcaaaggagcatagaattctaactagtatcttatggttttgtttttgccatctttttttcacttttccattggaattacttgcttatcaaattaagagggattttatctctggttttctttgttatcttctgttctcctttatgcattaaaggtaccatatgctttttcctggttcccagataatattttcttccaaatttttagatagcgattgaataaaaacgtcggttgacatttgatgagtatattgcttgccaagttatttcgatcatct

SEQ ID NO: 1771 - DNA, 1151 bp, Glycine max
attcttctgctatctctgcaattcaaacacaaaaaccatggcttccactaatgctcttcctcccaccggcaacggcctcatcgtgagcttcggcgagatgctcatcgacttcgttcccaccgtctccggcgtgtccctcgcggaggctccgggattcctcaaggcccccggcggcgcccccgccaacgttgccatcgccgtcgcgagactcggcggcaaagcggcgttcgtcgggaagctcggcgacgacgagttcgggcacatgctggccggaatcctgaaggagaacgacgtgcgatccgacgggatcaacttcgaaaagggcgcgcgcaccgcgctggcgttcgtgaccctacgcgccgacggggagcgtgagttcatgttctacagaaaccccagtgccgacatgctcctcacgcccgaagatctcaatctcgaactcatcagatccgcaaaagtattccattatggatcgataagcttgatcgtggagccatgcagatcagcacacttgaaggcaatggaagttgccagggaagcagggtgcttgctctcttatgacccaaacttgcggctacccttgtggccctcggccgaggaagcacggcagcaaatacttagcatatgggacaaggctgatgtgatcaaggtcagtgatgtggaactggaattcctaactggaagtgacaaaattgatgatgcatcggctctctccctgtggcatcccaatttaaagttgcttcttgtcactcttggagaacatggttctaggtactataccaagaatttccgtggatcagtggaggcttttcatgtcaacacagttgacacaactggcgctggtgattcctttgttggtgcactattaagcaagattgtcgatgatcaatccatacttgaagatgaagcaaggttaagggaagtactcaagtttgcaaatgcgtgtggggcaattacaactactaaaaagggagcaattcctgctcttcccacagaggctgatgccctcaagctgatcaaagagataaagataaaggagcatgtgcgtgaagccgggaacagaagatgtcttattttatgataaatttcacggaattgagccttggcccttcttacctaaaaataaataaagttcaggaaattggttcgtg

SEQ ID NO: 1772 - DNA, 1404 bp, Fagus grandifolia
attattttcgtaacgaaaccattgcgatggcttcaaatggagtagccgtgggcgagaccggaaccggtttgatcgtgagtttcggcgagatgctgatagacttcgtaccgaccgagtcgggcgtatcgctggctgaggcgccggggtttttgaaagctcccggtggtgctcccgccaacgttgcgatcgcggtgacgagattgggcgggaaggccgcgttcgtcggaaagctcggagacgatgagttcggtcacatgctggctgggatcttgagacaatacggcgttgttgacaaaggtattaacttcgacaaaggcgcacgtacggcgcttgcgtttgtgactctacgcgccgacggagaccgtgagttcatgttttaccggaatcccagcgccgatatgcttctcacccccgatgaactcaacctcgacctcattagatctgccaaagtttttcactacggatcgataagcttgatcgtggagccatgcagatcagcacacctaaaggcaatggaggtggccaaagatgctggtgtcctgctctcctatgaccccaacctccggctaccgctatggccgtcagcggaggaggcacgcgagcagatcttgagcatttgggataaggctgatttgatcaaagttagtgatgtggagcttgaattcctcacagggagtgacaagattgatgatgcctcggctatgacactatggcaccctaacttgaagctcctccttgtcactcttggtgagaatggctgcagatactataccaagaacttccatggaggagtagaggcttttcgtgtcaatacagtggatacaactggtgctggagattcatttattggtgccctgctctgcaagatcgttgatgaccaatccatacttgaagatgaacaaagattgaggggagtgctcaaatttgcaaatgcatgtggagccattacaactaccaaaaagggagcaatccctgcccttccaactgagtctgaagccctcgccctcctcaagggagcataaaagacttgattgctctttgttccaactctttctttctctggagcactctttttctctctctgttttcgtagtttttgcataggattgctttcagttcaattaaagagagtttcaaccctctcattttttctccttttttccctggctgtaatgatgggatggcttgcgttttaaggcattaataattaaattgtttttaaatttttgacctaattctttttaggtaaattcttgttttgctatttgttttatttggtttattcctacctaaatctagggatcaagtagttgtgggtgacacgcccgtcatcattttaaatgtttactcttgctaggttgcctttctgagtagtgaaagtaagcaagttgcaaaatggtctgg

SEQ ID NO: 1773 - DNA, 1657 bp, Eucalyptus grandis
cgtctttatctctccccgactcgacccaactactacttccttctccgccgctataaataagcctgaaatttctcttcatttcttctctctcccttctcctttctctctctacacatacgctgtttctctctcttctcgcctcctctgcaaatccatctccttcctccttcgaaccctccacccgcgatcccgatggcttcccgcaacaatggcatctccggcggcaagggcctcatcgtgagcttcggcgagatgctcattgacttcgtcccgaccgtgtcgggggtctccctggcggaggccccggggttcctcaaggcccccgggggcgcccccgccaacgtcgcgatcgccgtgacccgcctcggcggccggtccgcgttcgtcggcaagctcggggacgacgagttcgggcacatgctggccgggatcctgaaggagaacggggtcaactgcgacggcatcaacttcgaccagggggcgcggaccgcgctggccttcgtcacgctccgcgccgacggggagcgcgagttcatgttctaccggaacccgagcgccgacatgctgctcaagcccgaggagctcaacctcgagctgatcagatctgcgaaagtctttcattatggatccatcagtttgattgtggagccatgcagatccgcccatcttgaagcaatgcaagttgccaaggacgctggggctctgctctcctatgatccaaacctcagactaccattgtggccatcacctgaggaggctcgtgagcagatcaagagcatttgggacaaggcagatatcattaaagtgagtgatgttgaactggagttcctcacagggagtgacaagattgatgatgaaaatgcaatgacactgtggcaccccaacttgacacttctccttgttactttgggtgagcacggttgtagatactacaccaagcattttcatggacatgtggaagcattccatgttaacacggttgacacaaccggggctggtgattcctttgtcggggcactcctctgcaacattgttgacgaccgctccattctcgaagatgaaggaaaattgaggaaagtcctgaagtttgcaaacgcgtgcggagccatcaccaccaccaagaagggagcgatccccgccctcccgaccgaggctgatgtcctcagcttgatcgatggcacgaaataaagcattcgaacaagctccaattcttccattctctgattttcccttaggactagtcgttgcttgcttccattttcaattgaagagagtctggttagcattcctgctgcttctgtattcccattgctcccctgcgtatggtgtcacagactcctttgctttcttaagatatataaataatcctaataaaatttttgggcttgtgggggcactaagcacgccttcgtctcgtctaactttcaccttttttcctcctaaagtggtggatagccaattagccatcattgatgtcgctggtctaatcctctttcacttttttacttttcattcaattcaaatgaggttggctgctggtagtcttgttgaaatgcactacctaatctagcgtctgcgagagatctcctttaaaatataaaaacgtggtttttattacaggaggctactaggggagcgagtagggaccccgtgctgg

SEQ ID NO: 1774 - DNA, 1120 bp, Capsicum annuum
tctctctctctctctctattcagtatcgccatggcagttaacggcagtgcttcttccggtttgatcgtcagcttcggtgagatgttgatcgatttcgttccaactgtctccggcgtatcactcgccgaagctcccggatttctcaaagctcccggcggtgcaccggcgaacgttgcaattgcggtgacgaggcttggagggaaatcggctttcgtaggaaagctaggtgatgatgaattcgggcacatgctcgctggaattctgaagcagaatggtgtacaggctgatggaatcaatttcgataccggagcgaggacggctttggctttcgtgactctacgcgccgatggagagcgtgagtttatgttttacagaaatccaagtgccgatatgttgctcaagcccgaggagttgaatcttgatcttattagatctgctaaggtgttccactacggatcaattagtttgatcgtggagccatgcagatcagcacatttgaaggcaatggaagtagcaaaggaggcaggtgcattgctctcttatgacccaaacctccgtttgccactgtggccttcagcagaggaggcaaagaagcaaatcaagagcatctgggacaaggctgatgtgatcaaggtcagcgatgtcgagctcgaattcctcaccggaaatcccaagattgatgatgaatctgccatgtctttatggcatcctaacttgaagctcctcttggtcacccttggtgaaaagggttgcaactactataccaagaatttccgcggcagcgttggggcattccatgtgaagactattgacaccactggggctggtgattcttttgttggtgcacttctaaccaagattgttgatgaccaagccattattcaggatgaagcaaggttgaaggaagtactaaggtttgcctgtgcatgtggagccatcacaaccaccaagaaaggagcaatcccagctctgcctactgaagctgatgccctcactttgatcaagggtggagcatagagagaacaagatgatgatgttactacacttttaattcttttttcatgtctatccccttcatgagcctttttttttactttcaattaatcagtctagtagcggc

SEQ ID NO: 1775 - DNA, 1331 bp, Petunia hybrida
tcgagacactgttggcctactggatacctccttcaatcttctcctctctcctctcctctcctctatcctatacaacatatacctatacatacatattctctatatctctttctatatataatattcatcggcgatggcagttaacggcgcaagttccggtggattaatcgtaagtttcggggagatgttaatcgacttcgttccaacagtttccggcgtatccctagccgaagctcccggttttctaaaagctcccggcggtgcaccggcgaacgtcgcaatcgcggtgactaggctgggagggaactcggcgttcgtcggaaaactcggcgacgatgagtttggtcacatgctcgccgggattttgaaagagaacggggttaaagctgagggaatcaattttgatacgggagctagaacggcgttggcgttcgtgactttacgcgctgatggagagcgtgagttcatgttttataggaatcccagtgctgatatgttgctcacccccgatgagttgaatcttgatgttattagatctgctaagatattccactatggatcaattagtttgatagtggagccatgcagatcagcacatttgaaggctatggaagtggcaaaggaggcaggtgcactgctctcttatgacccaaaccttcgtttgccactgtggccatctgcagaggaggcgaggaagcaaatcaagagcatttgggacaaggcagatgtgatcaaggtcagtgataatgagctggaattcctcactggaagtgacaagattgatgatgagtctgccatgtccttatggcatcccaatttgaagctcctcttggtcacccttggtgaaaagggttgtagatattacaccaagaatttccatggaggcgttgaaggattccatgtcaagactgttgacaccaccggagctggtgattcttttgttggtgcccttctaaaaaagattgttgatgaccaatccatacttgaggatgaagcaaggttgaaggaagtactaacctttgcatgcgcatgtggagccatcacaaccacaaagaaaggagcaatcccagctcttcctactgaatctgaagccctcactttgcttaagagaggagcatagaatgaagatgatgctacccttatatttctttttcttgatatattttccccatttacgagcatttgctttcaatcaatcatggtattagcagcctttcagttttcagtttaggggtttcaaattttaatggtttcttgtggtgttgaaagactgtgcataaaggcacttaataaactaagctgtttcttcttcctaacaaaacaaaaacaaa

SEQ ID NO: 1776 - DNA, 1267 bp, Nicotiana tabacum
gaatcggcacgaggctcattatcttttcttctttattgtatagatatatactttacatatatacatatattctctctattcatcgtcgctatgggagctaacggcgttagttctggtttaatcgtgagcttcggcgagatgttgatcgattttgtaccgacggtctccggcgtttcccttgccgaggctccgggtttcttgaaggctcctggcggtgcaccggcgaacgtcgccatcgcagtgactaggctcgggggaaagtcggcgttcgtcgggaaactcggcgacgatgagttcggccacatgctcgccgggatactcaaacagaacggcgttcaagccgacgggatcaacttcgacaagggtgcgagaacggcgttggcattcgtgaccctacgcgctgacggagagcgtgagttcatgttctacaggaatcccagtgccgatatgttgctcactcccgacgagttgaatcttgaagttattagatctgctaaggtgttccactacggatcgattagtttgatagtagagccatgcagatcagcacatttgaaggcaatggaagtggcgaaggaggcaggggcattgctctcttatgacccaaacctccgtttgccgctgtggccgtcggcagaggaggcgaggaagcaaatcaagagcatctgggacaaggcagatgttattaaggtgagtgatgtcgagctggaattcctaactggaagtgacaagattgatgacgaatctgccatgtccttatggcatcccaatttgaagctcctcttggtcacccttggcgataaaggctgcaattattacaccaagaatttccatggaggcgtagaggcattccatgtgaagactgttgacaccaccggagctggtgattcttttgttggtgcccttctaaccaagattgttgatgaccaatccattcttgaggatgaagcaaggctgaaggaagtactaaggtttgcatgtgcatgtggagccatcactaccaccaagaaaggagcaatcccagctcttcctactgaatctgaagccctcactttgcttaagggaggagcatagaacgaagatgatgttacccttttaattctttttaatcgtgatatatttcaaccctttacgagtttttcctttcaatcagtcaaagtagtttcagcctttcatttttcactttcggggtttcggattttaatggtttcttgtaatgatgaaagacaatgcatcaaggcacttaataaactaagctttcttcctt

SEQ ID NO: 1777 - DNA, 1261 bp, Ricinus communis
caacactctttctctctctaagaacaacagcaacaagaaaaaaaaaacacgctttctctctctagaaacaatggcgtcagtaaccaatggcaagtcgtcctcttctttgatcgtgagcttcggcgagatgctaatcgacttcgtccccaccgtctctggcgtttctctcgctgaggcccccgggtttttgaaagcacccggaggtgctccggcaaacatggcgatcgcggtggcgagactgggcggaaacgcagctttcgtcggaaagttgggtgacgacgagtttgggcacatgctggccgggatcttgaaagaaaacggggttggcagtgacggtattaattttgacaaaggtgccaggaccgctttggcttttgttactctacgcgctgatggagagcgtgagtttatgttctacagaaatcccagtgctgatatgttgttgactcctgaagagcttaatcttgaagttattagatctgcaaaaatattccactatggatcaataagcttgatagtggagccatgcagatctgcacatctaaaggcaatggaagaggcaaagaatgcaggtgctctgctatcctacgatccaaatctgaggctgccattatggccatccgctgagtacgctcgtgagcaaatcatgagcatttgggacaaggccgatatcatcaaagttagtgatgtggagcttgaattcctcactggaagtgacaaaatcgatgatgaatctgcattgtcactgtggcatcctaacctgaagctgcttcttgtcacccttggtgaaaacggttgcagatattacaccaagaatttccatggatcagtggatgctttccatgtcaagactgtggatacgacaggtgctggtgattcatttgtaggagctctactatgcaagattgtggatgatctatctgtgctcgaggaggagccaaggttgagagaagtacttagatttgcaaatgcatgcggagccattacaaccaccaagaaaggagctattcctgcccttcccactgaggccgatgttctcagcttgatgaaggcatcttcataaatttgcaatcagttctcatttgccaccaccacccccttttttcgttttgcttcaagtttttatcttcaactttagtcctcgttaggaattgcttacagttcaattgggagagattttcaatctcaatttttctcctaaaaatgtgatgtcgttaatgacttcttctgctttatggcctattcaataaaaaacaatttt

SEQ ID NO: 1778 - DNA, 1284 bp, Vitis vinifera
cactattctaattctctctttgtttttctctctcgcgatggctcccgttattggcgtcaacggcggtgctggcggtctcattctgagtttcggcgagatgctgatcgacttcgtgccgacggtatccggagtgtccctggcggaggctcctggatttttgaaggctcctggaggtgctccagcgaacgtggccatcgccgtgacaaggcttggtggaagatctgcgtttgttgggaagctcggagacgacgagttcgggcacatgctggccgggatcttgaaggagaacggcgtgcgcggcgacggaatcaccttcgacgttggtgccaggacggctctggccttcgtcacgctccgcgccgacggagagcgtgagttcatgttctaccggaaccctagcgccgacatgctgctgaagccggaggagctcaacctcgagctcattcgatccgcaaaggtgttccactacggatccataagcttgatagtggagccatgcagatcggcgcatttgagggcgatggaagtggcgaaggaggccggagcactgctctcgtacgatcccaacctccggctgccactgtggccgtcggcggaggaggcgcgtgagcagatcatgagcatctgggagaaggcggaggtgatcaaggtcagtgacgttgagctggagtttctcaccggcagtgataaggtggatgacgagacagcgttgtcgctttggcaccctggcttgaagctttttctggtgacccttggggaaaagggctgcagatactacaccaagaatttccatggagctgtagagggatttcatgtcaaaacggtggatacaactggtgctggggactcatttgtcggtgcccttctatgcaaaatcgtcgatgaccaatctgtcctcgaagacgaggcaaggttgagagaagtcctgaagtttgcaaatgcatgtggagccattacaactacaaagaaaggagctatccctgctcttcctgccgaggctgacgtcctctccctactccatggcgcgtagacacactttcccattttccttttcctttggctttttagtttttatttttgttttctttaaatagtctggtttgggtttccatttcttgaataggagttgcttgcaattcaattaaaaaggaggatctccgatctctctgagttttttgttttttgtttttttttctctctctctctaaaatccctctcaatgtaatgatggaagacccgtgcttctaaggtattattaaataaatttctctttcatgtttggca

SEQ ID NO: 1779 - DNA, 1555 bp, Populus trichocarpa
cattaattacaaaaatttccacttgatctgtttctcactctataaatgaacctctcttcccttcccaactctctctctctccctctccctctccctgccattccctcctttgctttctctatctagaaaacacacaactctctttctcgtccctcacgttctcttgcaatggcttccaatggagtgaacgacaagtcactgatcgtcagcttcggggagatgctgatagacttcgtcccgacggtctctggcgtctccctcgctgaagctccggggtttgtgaaggcaccgggtggtgctccggcgaacgtggcgatagcggtggcgaggctgggaggaaaggcggcatttgttggaaaacttggtgatgatgagttcggcaacatgctcgccggaattttgaaggaaaacggcgtgatcgctactgggataaattttgacacaggtgctaggactgctctcgcgtttgttactctacgcgctgatggagagcgtgagtttatgttttatagaaatccaagtgctgatatgttactaaggccagaagagttaaatcttgagttaattagatctgctaaggttttccactatggatcaataagtttgattgtggagccatgcagatcagcacatttacaggcaatgagggtggcgaaggatgcaggtgcattgctttcgtatgacccaaatctgaggctgccattgtggccatcagcagaggaggcgcgtgagcagatattgagcatctgggacgaggcagatgtggtcaaagtcagtgataatgagcttgagttcctcactggaagtgacaaaattgatgatgaaactgccatgtcactctggcgtcctaactttaagttgctcttggtcacccttggtgaaaagggttgcaattattacaccaagaatttccatggatcagttgaggctttccatgtggacactgttgataccacaggtgctggtgattcatttgttggtgctctcctttgcaagattgttgatgaccaatctgtgcttgaggatgagccaaggctgagagagatacttagatttgcaaatgcttgtggagccattacaaccaccaaaaagggagcaatccctgctctgcctactccggccgatgccctcaaactggtgaaagaaggaaaataaactatttttttgttaatccgcactgcattttatccctttccttttcagctcctggttctcaattcaatcgaagagctgttgcaatctcaaattttcgcctttttctcttgagtgtaatgatggaaaagacttgcgctttaaggtcttgccaaataaattttttcttttaaacaaattgatcttgggcatcaagcagcaatcatgagtgttagctttctccaaatattatatttgtttaaagctaaaatttctgccaaacaagcaagttgcagacgttgtttatgtattaaaataatataaaatataatgtagaaatattaaaaaatttaatttaagacaaaaaattaaaattttaatgaaaatcgagttgcatgcctattcatcactagctataaagcat

SEQ ID NO: 1780 - DNA, 1154 bp, Rosa hybrid cultivar
ccctctctcggtctctcagaaatcaagtcttgatggctaacgacaagggtctgatcgtgagtttcggggagatgctgatcgacttcgtgcccaccgcttcgggcgtttcgctggccgaagccccggggttcttgaaagcccccggtggcgcccccgccaacgtcgccatcgccgtggctcggctcggcggccacgcctccttcgtcggcaaactcggcgacgacgagttcggccacatgctcgccggaatcttgaaggagaacggcgtgacgggagacggcatcctgttcgaccagggcgcgcgcaccgctctggccttcgtgaccctacgcgccgacggagagcgtgagttcatgttctaccggaaccctagcgccgatatgctgctcaagcccgaagagctcaatttcgagctcatcagatcggccaaagtgttccactatggatcaataagcttgatcgtggagccatgcaggtcggcacatctaaaggcaatggaggttgccaaagatgccggtgccttgctctcttatgaccctaacctccggctaccactgtggccctcacctaaggaggcacgcgagcagatattgagtatatgggaaaaggctgaagtgatcaaggtcagcgatgtggagctcgagttcctcacaggaaatgacagtattgatgatgaaaatgcactgactctatggcactctaacttgaagctcctccttgtcactcttggtgagaatggttgcaaatactacactaagaatttccgtggatctgtggaagctttccatgtaactgcggttgatactactggtgctggtgatgcatttgtgggtgctcttctcacaaagattgttgatgaccaatccattcttgaggatgagccaagattgagggaagtactcaaatttgcaaatgcatgtggagcaattacaactactaagaagggagcaattcctgcactccccactgagtctgatgccctcgccctaatcaaaggggcatagatccatttttgtttttcatccatctttctagggcttttgttctaagcttctttgcttttgattggagagtgttttccctcagtatttcttctcttcttgcgtgtattaatggtaaacttacccctcaagcatcactgaataaaatattta

SEQ ID NO: 1781 - DNA, 1262 bp, Fragaria vesca
cattctttgtttctccttcttcttcttcttcttcttcttcttctctgtggactgataatggccaacgacaagggtctgatcgttagtttcggcgagatgctgatcgacttcgtgccgacggcctcgggcgtctcgctggcggaagctccggggttcttgaaggcccctggtggcgcccccgccaacgtggcgatcgcggtggctcggctcggcggacacgccgccttcatcggcaaactcggtgacgacgagttcgggcacatgctggccggaatcttgaaggagaacgacgtctccggtgaagggatcctgttcgaccaaggcgcacgcaccgctctggccttcgtgaccctacgcgccgacggagagcgcgagttcatgttttatcggaaccccagcgccgatatgctgctgaagcctgaagagctcaatttcgagctcatcagatcggccaaagttttccactatggatcaataagtttgatcgtggagccatgcaggtcagcacatctaaaggcaatggaggttgccaaagaagcaggtgccttgctctcctatgacccgaacctccggctaccactgtggccctcacctgaggaggcatgcgagcagataatgagtatctgggaaaaggcagacgtgatcaaggtcagcgatgtggagcttgagttcctcacaggaaatcccaagattgatgatgaaaatgcactgactctatggcactctaacttgaagctcctccttgtcactcttggtgagcatggttgcagatactacactaagaatttccgtggatgtgttgaagctttccatgtaactgcggtagatactactggtgctggtgattcatttgtgggtgctctgctcgtgaaaattgttgatgaccaatccattcttgatgatgagccaaggttgagggaagtactcaaatttgcaaatgcatgtggagcaattacaacaaccaagaagggagcaattcctgcacttcccaatgagtctgaagccctcgccctaatcaaaggggcatagattcattcatgttgttcatccaactttctaggactttcgtttcaagcttctttgtttttgttgtgggagtgttgtccaagctcagtaattcttctctctttgcgtgtgttgacagtaaacttaccccttgcatcagagaataaatgttaatttttggctttatttttgtagtttaaagtcattttggttctgtttagtctgtttatatcaaatgaggagtaattgtttggata

SEQ ID NO: 1782 - DNA, 1144 bp, Vinca minor
gttcaagtttgattgtaagttttggtgagatgttgattgatttcgttccgactgtttccggtgtttcgctggcggaagcacccggatttttgaaagctcccggcggtgctccggcaaacgtggcaatcgccgtttccagattgggcggaaaagcttccttcgtcggaaaactcggtgatgatgagtttggacatatgctcgccggaatactcaaggagaacggagttggcgctgacggtatcaatttcgataccggtgccagaactgctttggctttcgtgactctacgcgccgatggtgaacgtgaattcatgttttatagaaatccgagtgctgatatgctattgactcctgatgaattgaatctcgaactcatcagatctgcaaaggttttccactatggttcaattagcttgatagttgaaccatgcagatcagcacatctaaaggcaatggaggcggcaaaggatgccggagctctactttcatatgaccctaacctcaggttgccactctggccatctgccgaggaagctcgtgagcagatcaagagtatctgggataaggccgatatcatcaaggtcagtgatgtggaactggagttcctcactggtagtgacaagatcgatgatgagtctgcaatgtccctttggcaccccaatttgaagcttctccttgtgacccttggggagaagggttgtagatattattctaagggattccgcggatccatagatggttttcatgtgaatactgtcgatacaactggtgccggcgactccttcgtaggagccctcctggccaaaattgttgatgatcagggtattttggaggatgagtcaaggttgagggaagtacttagattctcttgtgcttgtggagccattacaactaccaaaaagggggcaattcctgcactacctacagaatccgaagttcttagccttcttaacaagggaaattaataaggcttttagttttctgtttcgtggtattgttgatcaaagttttgcttgaattagcgtgtaggctttagaaatctcctttgtggattttggaccaaactttgttgttgtgatgatgtggctaattctggatcacaaggttcatatcagaaaaatcaaactttgtttcatgtaatgat

SEQ ID NO: 1783 - DNA, 1126 bp, Gossypium hirsutum
cttctatttcttaccttagaaaaagaaaagatcgtttattttttgctttcttatcgacgccatggcacctaacggggtcgtttccgacaagagttcaatcgtgagtttcggtgagatgctcatcgacttcgtccccaccgtctccggcgtttctttagctgaagctccaggcttcctcaaagcccccggtggagccccagccaacgtggcgattgccgtctcaagactaggcagtaaagcatccttcatcggaaaactcggcgacgatgagttcggtcacatgcttgccgatattctcaagcaaaacggagtctctggtgacgggatcttatttgaccaaggtgctaggaccgctcttgccttcgtaactctacgcgccgacggagagcgtgagttcatgttttataggaatcccagtgctgacatgctgttgacgccggaggaattgaatcttgatcttataagatccgccaaagtattccactacggatcaataagtttgatcgtagagccatgcagatcggctcacttaaaggcaatggaagtggccaaagaatcaggtgctttgttgtcatatgatccaaaccttcggctgccactttggccttcagccgatgaggccaggaaacagatattatccatctgggataaggccgatattatcaaggtcagcgatgttgagctagagttcctcaccggtagcaacaaaatcgacgatgaaactgctatgaaactttggcgccccaacttgacactactcttgatcaccctcggtgaaaagggtagcatgtattataccaagtacttccatgggtcagtggatgcattccatgtgaatacagtggatacaactggcgccggggactcttttgttggtgctttactatgcaagatcgtggaagacccaaccatacttgagaatgaatcgaaattgagggaggtactgaaattcgcaaatgcatgtggagccataaccacaaccaagaagggagcaatcccagcccttccaaccgaggctgaagtccttgccttaatcaatggagcttaggattattagcagcaaacttcaataatctatgctcatctttttctttttttaatttcttacatttcagagagagggttt

SEQ ID NO: 1784 - DNA, 1205 bp, Linum usitatissimum
ctcttctcctctcctccatttcagtttccaaccaagtcacaacaatggccttctccaatggcggctcaggctcctcctctctcatcgtcagcttcggcgagatgctcatcgacttcgtccccaccgtttccggtgtctccctcgccgaggctcccggtttcatcaaggctcccggcggcgcccccgccaacgtcgccatcgccgtcgccagactcggcgggaaggccgcgttcgttgggaagctcggagacgacgagttcggccgcatgctggccggtatcttgaaggagaatgccgtgatcgtagacggcatcaacttcgacaagggagccaggaccgctcttgcgtttgtgactttgaaggctgatggcgatcgcgagttcatgttctaccggaatcccagcgccgacatgctcctccagccggaggaactcaatcttgagctcattagatctgcgaaagttttccactacggatcaataagcttgatagtggagccatgcagatcagcacacatgaaggcaatggaggctgcgaaagatgcaggcgctcttctttcttatgacccaaatctgaggctcccattgtggccttcaccagaggaggcaagggagcagatacttagcatatgggacaaggcagagataatcaaggtgagcgacgtggagcttgaattcctgacaggaagtgacaagattgatgatgcctccgccatgtcactctggcacgacaacttgaagctgctcttggtcacccttggtgaaaagggttgcagatattacaccaagagtttccatggatcagtggatgcattccaagtgaatacggtggatacaacaggtgctggtgattcttttgtgggtgctcttcttaccaagattgtggatgaccagtccgttcttcaggaggaagcaagactgagggaagtgctcaagtttgcaaatgcgtgtggggcaatcacaacaaccaaaaagggtgcaatcccagctcttcccactgaagctgattctcttgcactcatcaaatcctcttcgcagtaaacaaaataattcagtggcgacctatcacagacaatcgattgtttcattttgttgatgttaatgttttgctttctttgtatttctccctaaaccctctcttggtaatatatgggtgtcgagggaaggaagagatggtggcaatgagtgtgatttttaattcaatat

SEQ ID NO: 1785 - DNA, 1304 bp, Gossypium raimondii
acttctattttcttaccttagaaaaacaaaagatcgtttattttttgctttcttatcgacgccatggcacctaacggggtcgtttccgacaagagttcaatcgtgagtttcggtgagatgctcatcgacttcgtccccaccgtctccggcgtttctttagctgaagctccaggcttcctcaaagcccccggtggagccccagccaacgtggcgattgccgtctcaagactaggcagtaaagcatccttcatcggaaaactcggcgacgatgagttcggtcacatgcttgccgatattctcaagcaaaacggagtctctggtgacgggatcttatttgaccaaggtgctaggaccgctcttgccttcgtaactctacgcgccgacggagagcgtgagttcatgttttataggaatcccagtgctgacatgctgttgacgccggaggaattgaatcttgatcttataagatccgccaaagtattccactacggatcaataagtttgatcgtagagccatgcagatcggctcacttaaaggcaatggaagtggccaaagaatcaggtgctttgttgtcatatgatccaaaccttcggctgccactttggccttcagccgatgaggccaggaaacagatattatccatctgggataaggccgatattatcaaggtcagcgatgttgagctagagttcctcaccggtagcaacaaaatcgacgatgaaactgctatgaaactttggcgccccaacttgacactactcttgatcaccctcggtgaaaagggtagcatgtattataccaagtacttccatgggtcagtggatgcattccatgtgaatacagtggatacaactggcgccggggactcttttgttggtgctttactatgcaagatcgtggaagacccaaccatacttgagaatgaatcgaaattgagggaggtactgaaattcgcaaatgcatgtggagccataaccacaaccaagaagggagcaatcccagcccttccaaccgaggctgaagtccttgccttaatcaatggagcttaggattattagcagcaaacttcaataatctatgctcatctttttctttttttaatttcttacatttcagagagagggttttgaaaggtatcgattttttcttcccctcttttgatttcctttttccctcgtttttcctccatccctccctgtgtagtgttgttaggctttgtgctttcaaggggagtaggaataaaaataaacctttaatttttcttttaccaatcataaatttcatgtttgagtttgagtttaat

SEQ ID NO: 1786 - DNA, 1267 bp, Gossypium hirsutum
tactattttctccttcttcactcctctgtttcagaatcaaaatctctctttctcgtcaatatggcagcaaatggcgttgtttctgacaagagcttgatcgtcagcttcggtgagatgctgatcgattttgtccccactgtctccggtgtttctctagccgaagctcccggcttcctcaaagcccctggcggtgctccggctaacgtggccattgctgttgctagactcggaggcaaagcgtcatttgtcggaaaacttggagacgacgagtttggtcacatgctggccgatattctcaagcaaaacggtgtctccggtgacgggatcttgtttgaccaaggcgctagaactgctcttgccttcgttacgttacgcgccgacggagagcgtgagttcatgttctataggaatcctagcgccgatatgctgttgaagccggaggagttgaaccttgatcttatcagatcttccaaggtatttcactatggatcaataagtttgatcgtggagccatgcagatcagctcatttaaaggcaatggaagtagccaaaggagctggtgcattgctctcatatgatccaaaccttcgcttgccactttggccttcagctgatgaggctaggaaacagattttgtccatttgggataaggcagatattgtcaaggttagtgatgtcgagctcgagttcctcaccggtagcaacaaagtcgacgacgaaactgccatgaaactttggcgacctaactttacactgctcttggtcacccttggtgaaaagggtagccgatactacaccaagaatttccgtggggcagtcgatgctttccatgtcaataccgtggacacaactggcgccggtgactcctttgttggtgcattgctatgcaagattgttgaaaacccaaccattcttgaggatgaagcaaaattaagggaagtgttgaaatttgcaaatgcatgtggagccatcacgacgaccaaaaagggagcaatccctgcactaccaaccgaggccgatgcccttgccttaatcaatggagcttagattttaagcaacttgaataatttgcacattgttttgcctcccgtgattatcctttcatttcaaagagttctcaatttattcccctttgatatgcgacctttgttcccccaacgcccaattgcttgtgttctaatgatggaaaagactttgtggttttaagcgtgtaggaaattcttttccctcttttataattttgcaatgtgattatcgaacttgttct

SEQ ID NO: 1787 - DNA, 1372 bp, Lupinus angustifolius
agataaaccattttggttattttattatccaaaaaatgaaaaaataatccttccctatatataaataaagaacacattatctttctctcttattctctctttgcatatctaatcgccatggcttccaccaccggtaacggcctcatcgtcagcttcggcgagatgctcatcgacttcgtccccaccacctccggcgtctccctcgctgaggctcctggcttcctcaaagctcccggcggtgcacctgctaacgtggccatcgccgtggctcgcctcggtggcaaagccgccttcgttggaaaactcggtgatgatgagttcggccacatgctcgccgggatcttgaaggagaacaacgtcaatgccgatggcattaccttcgatcaaggcgcacgcactgccctagctttcgtgacactacgcgccgacggagagcgtgagttcatgttctatcgaaacccaagtgctgatatgttactcacgcctcaagatctcaatcttcaactcattagatctgcaaaaatattccattatggatccataagcttgatagtggagccatctagatcggcacacttgaaggcattggaagtggccaaggaggcagggtccctactctcttatgatccaaacctccggttacccttatggccctcacccgaggaagctcgtgagcaaattctcagcatatgggacaaggctgatatcatcaagatcagtgatgtggagcttgaattccttactggaaaagttgatgatgcttctgctctctccttgtggcaccccaacttgaagttacttcttgtcactcttggtgaagatggttccaaatactataccaagaatttcaatggatcagtggatgcttttcatgttaatacagtggatacaactggcgcgggtgattcctttattggtgctctactatcgaagatcgttgatgatcaaaccatacttgaagatgaaccaaggttaagggaagtactgaagtttgcaaatgcaactggagcaattacaactactaagaagggagcaatccctgctcttcccacagagcctgatgtcctcaacctgattcaaaaagcataaaattctcactagtatcttttggttttattttaaatttttcatctttttttcacttttccattcaaaaagcataagagggaatttatttctggtttcttttgttatattctgtgctttttctaggttcccagataatatatcttctgttttagatagccattgaatgaacaagatcatagtgagctttggggatacaacttctggttaatgtgttgatgatatacaaatgctaaattaaatatgtattgaattggtataaattctggataggacttctctccat

SEQ ID NO: 1788 - DNA, 1229 bp, Solanum tuberosum
gcttctctctctattactatataataaaacctatagatacacctatagatacatatattttctctattcatcgtcgccatggcagttaacggtagtgctccttcttctggtttgatcgtcagtttcggtgagatgttgatcgatttcgttccgacagtctccggcgtatcccttgccgaggctcccggatttttgaaagctcccggcggtgcaccggcgaacgtcgccatcgcggtgacaaggctcggagggaagtcggcgtttgtcgggaaactcggcgacgatgagtttggtcacatgctcgccgggattctgaaaacgaacggcgtacaagccgacggaatcaattttgacaagggtgccaggacggctttggcgttcgtgactctacgcgccgacggagagcgtgagtttatgttttacagaaatcccagtgctgatatgttgctcacgcccgatgagttgaatcttgatcttattagatctgctaaggtgttccactatggatcaattagtttgatcgtggagccatgtagatcagcacatttgaaggcaatggaagtagcaaaggaggcaggggcattgctctcttatgacccaaatcttcgtttgccgctgtggtcttcggaagaagaggccaggaagcaaatcaagagcatctggaactatgctgatgtgatcaaggtcagcgatgtggaactcgaattcctcactggaagcaacaagattgatgatgaatgcgccatgtccttgtggcatcctaacttgaagctcctcttggtcactcttggtgaaaagggttgcaattactacaccaagaaattccatggaagcgttggaggattccacgtgaagactgttgacaccactggagctggtgattcttttgttggtgcccttctaaccaagattgttgatgaccaagccattcttgaggatgaagcaaggttgaaggaagtactaaggttttcatgtgcatgtggagccatcacaaccaccaagaaaggagcaatcccagctctgcctactgtatctgaagtcctcactttgctcaagggaggagcatagaaacatcatgttatctttttattttttttttccatctccatatattcccccctctatgagtttttttactttcaagctagttcaatttttagttttggattttaatgttttgttgtgatgacggtccatcaaggcacttaataaactaagctttcttccta

SEQ ID NO: 1789 - DNA, 1303 bp, Solanum phureja
tagaactcttcaaccaccttctatataaagctcctaataatcttcacttatcctcctcctcctcctcttctctctctattactatataataaaacctatagatacacctatagatacatatattttctctattcatcgtcgccatggcagttaacggtagtgctccttcttctggtttgatcgtcagtttcggtgagatgttgatcgatttcgttccgacagtctccggcgtatcccttgccgaggctcccggatttttgaaagctcccggcggtgcaccggcgaacgtcgccatcgcggtgacaaggctcggagggaagtcggcgtttgtcgggaaactcggcgacgatgagtttggtcacatgctcgccgggattctgaaaacgaacggcgtacaagccgacggaatcaattttgacaagggtgccaggacggctttggcgttcgtgactctacgcgccgacggagagcgtgagtttatgttttacagaaatcccagtgctgatatgttgctcacgcccgatgagttgaatcttgatcttattagatctgctaaggtgttccactatggatcaattagtttgatcgtggagccatgtagatcagcacatttgaaggcaatggaagtagcaaaggaggcaggggcattgctctcttatgacccaaatcttcgtttgccgctgtggtcttcggaagaagaggccaggaagcaaatcaagagcatctggaactatgctgatgtgatcaaggtcagcgatgtggaactcgaattcctcactggaagcaacaagattgatgatgaatgcgccatgtccttgtggcatcctaacttgaagctcctcttggtcactcttggtgaaaagggttgcaattactacaccaagaaattccatggaagcgttggaggattccacgtgaagactgttgacaccactggagctggtgattcttttgttggtgcccttctaaccaagattgttgatgaccaagccattcttgaggatgaagcaaggttgaaggaagtactaaggttttcatgtgcatgtggagccatcacaaccaccaagaaaggagcaatcccagctctgcctactgtatctgaagtcctcactttgctcaagggaggagcatagaaacatcatgttatctttttattttttttttccatctccatatattcccccctctatgagtttttttactttcaagctagttcaatttttagttttggattttaatgttttgttgtgatgacggtccatcaaggcacttaataaactaagctttcttcctatggatcttc

SEQ ID NO: 1790 - DNA, 1054 bp, Manihot esculenta
ctgtctagaacccttcattttctcttacaccaaagtcaaaatcttcttccaatggcgtcagcggtctccaatggcagctcaggctcttccctcatcgtcagcttcggcgagatgctgatcgactttgtccccaccgtctccggcgtgtccctagccgaggcacctggtttcttgaaggcaccgggtggtgcaccagccaacgtcgcaatagccgttgctaggctcggtgggaaatctgccttcgtcggtaagctaggggatgacgagttcggccacatgctcgctgggatcttgaaggaaaacggcgtgatcggtaacggtatcaactttgacaaaggagcaaggactgctttggcgttcgtgactctacgcgctgacggagaacgtgaattcatgttttaccgtaatcctagcgctgacatgctcttgaaacctgaagagctgaatcttgaactcattagatctgccaaagttttccactatggatcaataagcttgatagtggagccatgcagatcagcacatctcaaggcaattgaaacggcaaaggacgcaggagccctgctatcctatgacccaaatctgaggctgccattgtggccttcagctgcggaggctcgtgaacagataatgagcatttgggacaaggcagaggtgatcaaagtcagcgatgttgagcttgagttcctgactggaagtgacaaaatagatgatgctgatgccttgtcactttggcatcctaacttgaagcttcttttggtcacccttggtgagaagggttgcagatattataccaagaatttccatggatcagtggaagctttcaatgtcaaaactgtggatacaacaggtgctggcgattcatttatcggagctctattatgcaagattgtggatgatcgatctataattgaggatgaagcaagattaagggacgtgctcaagttcgcaaatgcatgtggagccattacaaccaccaagaaaggagctatccctgcccttcctaccgagcaggaagtcctcgccctaatcaacggctcaaaatagacaattt

SEQ ID NO: 1791 - DNA, 3728 bp, Cannabis sativa
ttttttcaatcttatccaataaaaaataaaaatctaatttaatgttaatgagattcgagactgtgggtccacaacctaactaaaaaataaatcataaaaaaaaatatatgataatttccctaataatctccaccagatcgtattagcctccctataaataccacccataaccggtctccttccatcgtctcatatatcattcttcttctctcactcactgttctctctctctaaaacaatttcattctaatggcttcctctaacaatggcgtttcagaaaatggcaagggtctgatcgtcagtttcggtgagatgctgatcgactttgttcccaccgtctccggcgtctctctagccgaagctcctggatttctcaaagccccaggaggcgctccggccaacgtcgccatcgccgtcaccaggctaggtggtaaagccgccttcgttggaaagctcggagacgatgagttcggacacatgctcgccgggatcttgagagataacggtgtctccacccaaggaatcaacttcgatcaaggcgcacgtaccgccttggccttcgtcactctcaaagccgatggcgaacgcgagtttatgttctacagaaaccctagcgccgacatgcttcttaggccagatgagcttaatttggagttgattaaatcggctaaagtgtttcactatgggtccataagcttgatcgtagagccatgccgatcggcacacatgaaagcgatggaggcggctaaggacgccggggccctactctcatacgacccaaatctcaggttgccactgtggccctcagaggatgaggcacgtgagcaaattctcagcatatgggacaaggctgacgtcatcaaggtcagcgatgtggagcttgtgttcctaactaaaaatgacaaaatcgacgatgcctccgccatgtctttgtggcaccccaacctcaagcttctccttgtcactcttggcgagaatggctgcagatactacactaagaatttccatggatctgtggatgctttccatgttaaagcagtggacacaactggtgctggtgattcatttgttggtgctttactcaccaagattgttgatgaccaatccatcattgaggatgaggcaaggttgaaggaggttcttacatttgctaatgcatgtggagccattaccaccaccaagaagggagcaatcccagctcttcccactgagactgaggtcctcagcctggtcagaggtgcataagagaaggggggaaattttctttaatttctgcctgttttagttttgatttcccttaacgttttcttgtttgttttgttttggggacctttttcttttgtttttttaggatctgcttgcaatttgagtaaagggaattttccgacctcagtaatgctatttctttttttcatgttttctcttttatttaccttccttttcacttattttatgctgtaatggtaaaagacgatgtgctctcatgcatattgctgtgaataacttcttttaatgaccaaagaaaaatgtgatacataaatgcaaagctcaaaacacccacttctaggacggctttgcacatgcctacaaatacattaatcattattgtttattccctttgaagataaaaatagaatccattcttttctttttatctttttcgattgcgaacctaatttgtaaaagagaacaatattgtcacttcgtttatagaaagtgagacctaacccaaccacctgtctcacttccttttcgtaaacaaggttgcgtacatctgactatagataagacgtcgcagatctctacctcttcattctcaaaagaatctaagtgataaatcataatgtgatcgatcacctcatctctcaaaaagtatataatactgaaagaattggcaagttcattccaaactaatttcggagaacatttaactttctgttctagctgtaccacgtattccataatttatcagcaaataaaaatcaatccccaagtttaagaatattaagataaaattctcaattaatcaagtggtaaaggagagcttctacaagttttgtattttgttttatttttttgtttctttatattttccattgttatcccttgaaaaaagaatattaagataaaattctcaattaatcaagtggtaaaaggagagcttctacaacttttgtattttgttttatttttttgtttctttatattttctattgctatcccttgaaaagatgataaggaatgcaattacaacacaatggcttgtgggttgcattcactcacatccatccgcagagacctccaagcttgcttgcacctttcccacttcatctgcatatgacccaaatacgcttttgcccatagttcattgctcccacccgtgcttagaccatacggcactgagaaactgtttgcattttcacaaaacatagtaaaaacaataacgtatcaaacacgaaggtgtcatcatcattatcaacaataagtacaattaatataaaatatgaaacctcaaaactaaaacaataagttaccataatatagcatggtccacaaactagaatattaacacaatgtccaaaatgagtgttacctcaacaattcctccatctcagatcccttggtggatgaaccattcctgcaaaaaataaaaaaaaaataaaaaaatagtacaagtttaaccaataccttccattggtaaattattgttcctgaacatgcaattgtttaaataataataagaccccctctataaagcatatggcatactcataggctcatatttcgttttctctgagaaaatttcctaaacttttatgttgattacgtacaaggtattgaagtcctaattcataagtaaaaaggtcaaacccattcacatatatttagcaaatatacaaataaaaaactataaagtacaaacctacaaacagatattttgaaaagatgaagagacttggtggagagattacgaatagcctccgaaatatggtccttgccaaatgcatatactactggatacccaagaagccatctgaagcatatacaataacatcatgatgtgagtgtgatatctggttctaattttgaaactgaagctacacagaagaaggattgtctatcttctaaattaatcaaaggtcgatctttgtatgcaattacttatggataccacaaaacaaataggtaaaatactctaacattattaatgcagatgtatcttcatatagaaaattacccatttaaagttggtactgtgacctgggtgtcttgcagacaactagtaagatcaataaaatatgaagattgcaaagtcataatgtcattgacaggataatgaacattcagcatttcacctgtcctgggacatgacaagcaattactcttcattccgtcaataagaaatatctcagcgaacagcttctgaactgatagaaactgcatcactaaagggttgttttcaggctgagatatcatctggaacaaaatgaagaaagcatcttcactaaagacgaaatataaacatgtctataatttccattagataaagaaaaagtccacagcaagacctttagaggatcttgttcaaggtccacaaagagcagctgtatttctgagttcaaacttgactgaacatgctcagcaagtcctcttatgtgtaccaaatatatcatatcttctatgatcattactctcaaatgttggaaaatgctagactcctgcatttt

SEQ ID NO: 1792 - DNA, 1315 bp, Gossypium raimondii
tcttatactattttctccttcttcactcctctgtttcagaatcaaaatctctctttctcgtcaatatggcagcaaatggcgttgtttctgacaagagcttgatcgtcagcttcggtgagatgctgatcgattttgtccccactgtctccggtgtttctctagccgaagctcccggcttcctcaaagcccctggcggtgctccggctaacgtggccattgctgttgctagactcggaggcaaagcgtcatttgtcggaaaacttggggacgacgagttcggtcatatgctggccgatattctcaagcaaaacggtgtctccggtgacgggatcttgtttgaccaaggcgctagaactgctcttgccttcgttacgttacgcgccgacggagagcgtgagttcatgttctataggaatcctagcgccgacatgctgttgaagccggaggagttgaacgttgatcttatcagatcttccaaggtatttcactatggatcaataagtttgatcgtggagccatgcagatcagctcatttaaaggcaatggaagtagccaaaggagctggtgcattgctctcatatgatccaaaccttcgcttgccactttggccttcagctgatgaggctaggaaacagattttgtccatttgggataaggcagatattgtcaaggttagtgatgtcgagctcgagttcctcaccggtagcaacaaagtcgacgacgaaactgccatgaaactttggcgacccaactttacactgctcttggtcacccttggtgaaaagggtagccgatactacaccaagaatttccgtggggcagtcgatgctttccatgtcaataccgtggacacaactggcgccggtgactcctttgttggtgcattgctatgcaagattgttgaaaacccaaccattcttgaggatgaagcaaaattaagggaagtgttgaaatttgcaaatgcatgtggagccatcacgacgaccaaaaagggagcaatccctgcactaccaaccgaggccgatgcccttgccttaatcaatggagcttagattttaagcaacttgaataatttgcacattgttttgcctcccgtgattatcctttcatttcaaagagttctcaatttattcccctttgatatgcgacctttgttccccccacacccgattgcttgtgttctaatgatggaaaaggctttgtggttttaagcgtgtaggaaattcttttccctcttttataattttgcaatgtgattatcgagcttgttctgtcatcatttaaagtttaaactgaacatcgaagtaaatttgaa

SEQ ID NO: 1793 - DNA, 1256 bp, Actinidia deliciosa
tctctctctctacatatcctttttgacataaaagtcctctctctctctctctctccataatggccatgaaaaacggaggagtgccgtccggcggcctgatcgtgagcttcggggagatgctgatcgacttcgtaccgacggtgtctggggtgtcactggcggaggcgccgggcttcctcaaggctcccggcggcgctccggccaacgtggccatcgccatcaccaggcttggcggccgatccgccttcgtcggcaagctaggcgacgacgagttcggccaaatgctcgccggaatcctccggcagaacggcgtcgccgacgacggcatcctcttcgacaccggcgcacgcaccgccctcgccttcgtgaccctacgcgccgatggcgagcgcgagttcatgttctaccggaaccctagcgccgacatgctcttgactcccgatgaactcaaccttgacctcattagatccgctaaaatattccattacggatcgataagcctgatcgtggagccgtgtagatcagcacatttgaaggcaatggaagtggcaaaggacgccggagcgctgctctcgtatgacccgaacctgcgcctgccactgtggccatccgcggaggaggcgcgggagcagattatgagcatttgggacaaggcagaggtgatcaaggtcagcgacaacgagctcgagttcctcaccggaagcgataagattgatgatgaatctgcaatgtctctgtggcaccccaatttgaagcttctccttgttacccttggtgagaagggttgcagatattacaccaagagctttcatggatctgtggatgcattccatgtcaaaacggtggatacaacaggtgctggtgacgcctttatcggcgctcttttgtgcaagatggtggacgaccgatctgtaatcgaggatgaagcaaggttgagggaaatactgaaatttgcaaatgcatgtggggccatcaccaccaccaaaaaaggagccatcccagctctccccactgaatctgacgtcctcagccttgttaaaggggaatagaagactgaagaattttccaattttattttggtttgttttttgcacttccatttttatttctttttttgggagtttgcttgcaattgagtcaaagtaggttagttttctctttccattcttgattttctatttctctatgctttcaatgatgagacctttgctttaagggattaataaaaatataataagtttctccaaaaaaaaaaa

SEQ ID NO: 1794 - DNA, 1288 bp, Solanum lycopersicum
atcctcctcttcttctctctgttatactatataaaaatctatagatacacctatagatacatatattttctctattcatcgtagccatggcagttaacggtgcttcttcttctggtttgatcgtcagtttcggtgagatgttgatcgatttcgttccgacagtctccggcgtatcccttgccgaggctcccggatttttgaaagctcccggcggtgcaccggcgaacgtcgctatcgcggtgacgaggctcggagggaagtcggcgttcgtcgggaaactcggcgacgatgagttcggtcacatgctcgccgggattctgaaaacgaacggcgtacaagccgaaggaattaattttgacaagggcgccaggacggctttggcgttcgtgacgctacgcgccgacggagagcgtgagtttatgttttacagaaatcccagtgccgatatgttgctcacgcccgctgagttgaatcttgatcttattagatctgctaaggtgttccactatggatcaattagtttgatcgtggagccatgtagagcagcacatatgaaggcaatggaagtagcaaaggaggcaggggcattgctctcttatgaccctaaccttcgtttgccgttgtggccttcagcagaagaggccaagaagcaaatcaagagcatatgggactctgctgatgtgatcaaggtcagcgatgtggagctcgaattcctcactggaagcaacaagattgatgatgaatccgccatgtccttgtggcatcctaacttgaagctactcttggtcactcttggtgaaaagggttgcaattactacaccaagaaattccatggaaccgttggaggattccatgtgaagactgttgacaccactggagctggtgattcttttgttggtgcccttctaaccaagattgttgatgatcaaaccattctcgaggatgaagcaaggttgaaggaagtacttaggttttcatgtgcatgtggagccatcactacaaccaagaaaggagcaatcccagctttgcctactgcatctgaagccctcactttgctcaagggaggagcatagaaacatcgtgttatcttttttcttttttccatcttcatatatttccccccctttatgagtttttttgaagctagtaggaagccttttcagttttggattttaatgttttgttgtgatgaatgtccatcaagacacttaataaactaagctttcttcatatgcagcttccttgtaacttctcctttacatcatcatactagtatttcattatccaa

SEQ ID NO: 1795 - DNA, 1594 bp, Utricularia gibba
gtatgaataagatcttccctattaactttctcaaggaaacaggaaatattgtcactatggccttatccgcccaagcaaaggaaaacatgatcttgtggcatcgaagatttggacaccacaatcagatgtctctgtacaaaacacaacaaagggaactacttattgggattccaacactagaacaagatggagattgctgcaaaatctgtcagcttggaaagatgtctcgaccatcattttcacagagcatatggacagcacaacagccactagaagtgatctgttcagacgtttgtgggcctattacatcatctactcaagctgggaaccgatactttgtattatttatagatgaattctcgaagtatgcctgggtttatttccgcatgaactccaaaaatactgccaagagcctggttcctgttttgtgtatatacactacagtacgcatatatggcggcggcagctggaaccgggagcggtggtttgatcgtcagtttcggtgagatgctgatcgatttcgtgcccacagtttctggggtgtcgttggcggaggcgcctggttttctcaaggcgccgggaggtgcgccagctaacgtcgctatcgcggtcgcgaggttgggtgggaaggcggcgtttgtggggaagttgggtgacgatgagtttgggcatatgttggttgggattttgaagaagaatggcgtctctgcggagggagtgaacttcgactctggcgctcgaacggcgctggccttcgttactttgcgtagtgatggagagcgtgagttcatgttctacaggaatcctagcgctgatatgctgcttactccggaggagttgaatcttgacctcatcagatccgcaaaagtgtttcattatggatcaataagcttgatcgtggagccctgtcgatcagctcacctgaaggcgatggaagttgccaaggaggctggtgctttgctttcttatgacccgaatcttcggctgccactgtggccttcggccgattatgctcgggaacagatactgagcatatgggataaggcagatgtgatcaaggtcagtgatgtggaactggaattcctcactgggagtaacaagatcgatgatgaatcagccatgactctgtggcaccccaacttgaaactcctgctagttactctgggagagaatggatgcagatactacactcagagtttccacggatcagtggatgcatttcaagtgaagacagtggacacaacaggagcaggtgactcttttgtgggagctctactctgtaagattgttgatgaccactccatcattgagaacgagacgaggctcaaggaggtgctgaagtttgcatgtgcttgtggagcaatcaccacaacacagaaaggagcaatccccgctcttcctacccctgataaagtccttgatcttctcaatgactcttgaaatgaatgagagaagaggaagtgctcatctcctgcttgatcactatgtcttcgtgacgctcaagcatttacctttttacatgtgagatttgtgactagtttttttactgttcaatgatattgaggaagcattttcctttagtactacatttttc

SEQ ID NO: 1796 - DNA, 1126 bp, Tripterygium wilfordii
gcggttcacaacggcgagtccactggtcctctgatcgtcagcttcggggagatgctcatcgacttcgtgcccacggtttccggcgtgtcgttggcggaggctccgggatttctcaaggcccccggcggtgcaccggctaatgttgcaatcgcagtcgccagactcggaggccatgcggcgttcgtcggcaagctaggagatgacgagtttggtcacatgctcgccgggatcctcggtgagaacggcgtcagcaccaaagggatcaacttcgatctaggcgctcgcactgccttggcgttcgtgactctacgcgccgacggggagcgtgagttcatgttctacaggaatcctagcgccgacatgcttttgacgcccgaagagctcaatctcgagctcattagatccgcgaaagtgtttcattacggatcgataagcttgattgtggagccatgcagatcagcacatctgaaggcaatggaagccgcaaaagaggccggtgccctgctctcgtacgacccgaacctgaggctgccgctgtggccctcacctgcggaggcgcgtgagcagataatgagcatctgggacaaggcggaggtgatcaaggtcagtgacaatgagctggagttcttgacagggagtgacaaaattgatgatgcagctgctttgtcactgtggcatcccaacttgaagcttcttttggtcactcttggtgagaagggttgcagatactacaccaagaacttccatgggcaagtggatgctttcaatgtcaaagctgtagatacaacaggagcaggtgatgcattcgttggagccttattgtccaagatagttgatgaccaatctgtaattgaggacgaaccaaggctgagggaagtactcaagttttcaaatgcatgtggtgccattacaaccatcaagaagggagccattcctgctctcccaaccacatccgaggtcctcacttttgtcaaaggggcttaagaggctttttcctttgtttttttttagaagttactcttcttaagccttgtcttctctctgctcgtgctttgagtttccatatatacggagttctcctctggctattcaatagggtttttcaagtgtctcgtgatgattgaaa

SEQ ID NO: 1797 - DNA, 1287 bp, Linum usitatissimum
cagaaatcccttccccatttctccgattcccctaagatggcctccaatggcggatcaacggactcctctctaatcgtcagcttcggtgagatgctgattgacttcgtccccaccgtatcgggtgtctccctcgccgaggctccaggcttcctcaaggcgccaggcggcgcacccgcgaacgtcgcgatcgccgtctccagactcggcgggaaatccgccttcgtcggaaagctcggcgacgacgagttcggccacatgctggccgggatcttgaaggagaacggcgtgatctgcgatggcatcaacttcgacaagggagccaggaccgccctcgccttcgtcactctcaaggccgacggcgaccgcgagttcatgttcttccgcaaccccagcgccgacatgctcctccagcccgaggagctcaatctcgagctcatcagatctgccaaagttttccactacgggtcgataagcttgatagtggagccatgcagatcggcacacttgaaggcgatggaggccgcaaaggacgccggtgcacttctatcgtatgatccaaacctgaggctacctctgtggccttcccctgaagaggctcgtgagcagattctcagcatttgggacaaggcggagatcattaaagttagcgatgtcgagcttgagttcctcaccgggagtgacaagatcgacgatgcttctgcaatgtccctctggcatgacaacttgaagttgctccttgtcaccctcggggaaaagggttgcaattactacaccaaggggttcaacggaacagtcgaggcgttccacgtgaacgcggtggacacgacaggagccggtgactcctttgttggggctctactcaccaagatcgtcgacgaccggtctattctcgaggatgaagcgaggttgaaggaggctctaagattcgcaaacgcgtgcggagccatcacaacgacgaaaaagggtgcaatccctgctttgcccaccgaagccgatgttctctccttcatcaaatcgtccttcgctcactagccggcgctggggatagtttcgtcatttctcaatttgttgttgttcatttcttttgcctaatgtattggattgtgaagacattgttgttcatgtagcggggaaagtgtccttttttcacggtctcccaaaagagaaaaagtgtttatctttgacaatattattcctaaccatgggtatttgatcctatttaattcgatatgagcgagtatggaaaatatttataaaaaataaatgaaaacagatcgatgatgaatt

SEQ ID NO: 1798 - DNA, 1173 bp, Linum usitatissimum
caactctttctctccagaaatccccatttctcccgattcccctaagatggcctccaatggcggatcaacggactcctctctgatcgtcagcttcggcgagatgctgatcgacttcgtccccaccgtatccggcgtctccctcgccgaggctccaggcttcctcaaggctccaggcggcgcccccgccaacgtcgcgatcgccgtctccagactcggcgggaaatccgcctttgtcggaaagcttggcgacgacgagttcggccacatgctggccgggatcttgaaggagaacggcgtgatcggtgacggcatcaacttcgacaagggagccaggaccgcactcgccttcgtcactctcaaggccgacggcgaccgtgagttcatgtttttccgtaaccccagcgccgacatgctcctccagcccgaggagctcaatctcgagctcatcagatctgccaaagttttccactacgggtcaataagcttgatagtggagccatgcagatcggcacacatgaaggcgatggaggccgccaaggatgccggcgcacttctgtcatatgatccgaacctgaggctacctctgtggccttcccctgaagaggctcgtgagcagattctcagcatctgggacaaggcggagatcattaaggtcagcgatgtcgagcttgagttcctcaccgggagcgataagatcgatgatgcttctgcaatgtccctctggcatgacaacttgaagctgctacttgtcaccctcggtgaaaagggttgcaattactacaccaaggggttccacggaacagtcaaggcgttccacgtgaacgcagtggacacgacaggagccggtgactccttcgttggggctctactcaccaagatcgtcgacgaccggtccattctcgaggatgaagcgaggttgaaggaggctctaagattcgcaaacgcgtgcggagccatcacaacgaccaaaaagggtgcaatcccggctttgcccaccgaagccgatgttctttccttcatcaaatcgtcctccgatcactagccgccgggcgggaggatagtttcgtcatttctcaatttgtgtttaaatttgttgttgttcatttcttttgcctgatgtattggattgtgaagaacattgtttcatgtagcagggaaagtgtccttttttca

SEQ ID NO: 1799 - DNA, 1351 bp, Gossypium hirsutum
accatataagcacccctttctcgccttctgtaactccctctcttatactattttctccttcttcactcctctgtttcagaatcaaaatctctctttctcgtcaatatggcagcaaatggcgttgtttctgacaagagcttgatcgtcagcttcggtgagatgctgatcgattttgtccccactgtctccggtgtttctctagccgaagctcccggcttcctcaaagcccctggcggtgctccggctaacgtggccattgctgttgctagactcggaggcaaagcgtcatttgtcggaaaacttggggacgacgagttcggtcatatgctggccgatattctcaagcaaaacagtgtctccggtgacgggatcttgtttgaccaaggcgctagaactgctcttgccttcgttacgttacgcgccgacggagagcgtgagttcatgttctataggaatcctagcgccgacatgctgttgaagccggaggagttgaacgttgatcttatcagatcttccaaggtatttcactatggatcaataagtttgatcgtggagccatgcagatcagctcatttaaaggcaatggaagtagccaaaggagctggtgcattgctctcatatgatccaaaccttcgcttgccactttggccttcagctgatgaggctaggaaacagattttgtccatttgggataaggcagatattgtcaaggttagtgatgtcgagctcgagttcctcaccggtagcaacaaagtcgacgacgaaactgccatgaaactttggcgacccaactttacactgctcttggtcacccttggtgaaaagggtagccgatactacaccaagaatttccgtggggcagtcgatgctttccatgtcaataccgtggacacaactggcgccggtgactcctttgttggtgcattgctatgcaagattgttgaaaacccaaccattcttgaggatgaagcaaaattaagggaagtgttgaaatttgcaaatgcatgtggagccatcacgacgaccaaaaagggagcaatccctgcactaccaaccgtggccgatgcccttgccttaatcaatggagcttagattttaagcaacttgaataatttgcacgttgttttgcctcccgtgattatcctttcatttcaaagagttctcaatttattcccctttgatatgcgacctttgttccccccacacccgattgcttgtgttctaatgatggaaaaggctttgtggttttaagcgtgtaggaaattcttttccctcttttataattttgcaatgtgattatcgagcttgttctgtcatcatttaaagtttaaactgaacatcgaagtaaatt

SEQ ID NO: 1800 - DNA, 1220 bp, Cyclamen graecum
ctctcccattatctctctctaaaaccaagcaatctgcaatggcttccaactccggccttatagttagcttcggcgagatgctgatcgacttcgtcccgaccgtatcgggcgtgtccctcgccgaagccccgggcttcctcaaagcccccggcggtgccccggccaacgtggccatcgcggtggccaggctcgggggccgggccgcgttcatggggaagcttggggatgatgagttcggacacatgctcgccgggatcctgaaggagaacggcgtgtccggcgatggaatcttgttcgatcagggcgctaggacggcattggcattcgtgacgctacgtgcggacggggagcgggagtttatgttttacaggaacccgagtgcggatatgctgctaacgccggaggagcttaatcttgagcagatcagatctgcaaaaatctttcattatggatcaataagcttgatagtggagccatgcagatcggcacacataaaggccatggaggaggccaaggctgctggggctcttctctcctacgaccccaatcttcgactgccgctgtggccgtcagctgagaatgcacgcgagcagattctgagcatctgggacaaggccgagatcatcaaggtgagtgacgtagagctggagttcctaacagggagcgacaagattgacgatgaggatgcacagtccctgatgcacccaaaattgaagctcttactcgtgaccctaggcgagaaagggtgtagatattacaccaagaatttccatggtgctgttgatgccttccatgttaatgctatcgatacgactggtgctggtgactcgtttgttggtgctctactttgcaagatagtggacgaccaaaagattcttgaggatgaatcaaggttgagggacgtgcttaagtttgcaaatgcttgcggagccatcactaccacaaagaaaggagccatcccggccttgcctaccgaagtcgacgtcctgaatctcatgaaaggaaattaaaaatttcccaagccttcgacctttatttcttgtttccgtccttttcgattttgaactctgctccgtagattattgtttgttttcgagtttttcttaattaagtgtcgtgcttataataatccgtgttttgatagttactgttcaggctcgaatcatttatagacaaatgaacatgagcgagttatttcatttgcattcttagcagcctgg

SEQ ID NO: 1801 - DNA, 1115 bp, Valeriana officinalis
tatatatacagtataggataattatttgattatttgattttctctctcgatggcggcgagcaatggagtttcatcgacgggaggtttgatcgtgagcttcggagagatgttgattgactttgtgcctactgtttccggcgtctcactagcggaggctccgggatttctcaaggcacctggtgggtgcgtccggctaatgttgcgatcgctgttgctaggcttggcggaaagtcggcgttcgttggtaagcttggggatgacgagtttggacacatgcttgccgggatcctgaaggagaacggtgtctctggtgaggggatcaacttcgataaaggagctcgtactgcgcttgctttcgttaccttgaaagctgatggcgatcgtgagtttatgttctaccgaaaccccagcgccgacatgctgttgactcctgaagaactcaatctcgaacttatcagatctgctaaagtatttcattatggctcaataagcctgattgtggagccatgtagatcagctcatttgaaggcaatggaagtggctaaagatgccggtgcacttctatcgtatgatccgaatctacggctaccattgtggccttcggcagaggaagcaaaagaacaaattatgagcatttgggagaaagcagagattatcaaagtcagtgatgttgagcttcaattcttaactggaaatgataatattgatgatgaatctgctttgtctctttggcatcctaatttgaagcttcttttagtcactcttggtgaaaaaggctgcagttactacactaagaatttccatggatcagtcgatgcgtttcatgtgaaagctattgatacaaccggtgcaggcgattcattcatcggtgcactcttgtgcaagatcgtcgacgatcaatctgtactcgaggacgaagaaagattgaaggaagcagtgaaattcgcatgcgcttgtggagccattacaacaacgaagaaaggtgcgattccagctcttccgactgaatctgaagtcgtatcttttatcaattccagttaaactgtttccttccaaattctaagttaggtgtttttgcatttgctaagtgcattgcaagcatgatttgttcggag

SEQ ID NO: 1802 - DNA, 1207 bp, Brassica oleracea
ctcatatccaaaactaatctctaccatcaaataaaacacattccgaccacaaaatggcagcatccaacggcgagaaaagcttgatcgtgagcttcggtgagatgctcatcgacttcgttcccaccgtctccggcgtctcactcgccgaggctcctggcttcatcaaggcccccggtggcgcacctgccaacgtcgccatcgccgtttctcgtctcggtggtcgcgctgcttttgtcggaaagctcggtgacgacgagttcggtcacatgctcgccggaatcttgaaacaaaacggcgtttccgccgaaggaatcaactttgacaccggagctaggaccgcactggcgttcgtgacgctaagatccgacggagaacgtgagttcatgttttaccggaaccctagcgccgatatgctcctccgtcccgatgagcttaatctcgatctcatcaaatctgctaaggtgtttcactatggatcaataagcctcatcgttgagccatgtagatctgctcacctgaaggctatggaagtggctaaagaagctggtgcgttactctcttacgacccaaacttgaggctgcctttgtggccctcgaaggaggaggctaagaagcagattcttagtatctgggacaaagctgaagtgatcaaagtcagcgatgaagagcttatgtttttgactggatctgataacgttgatgatgagactgctttgtctctgtggcatgataacttgaaacttctcttggtcactttgggtgaaaagggttgtaaatattacaccaagagtttccgtggatctgttgatcctttccatgttaacacagtggatacaactggagctggtgattcatttgttggtgccttgctttgcaacattgttgatgaccgctctgttcttgaggacgaagctcgtctaagagaagtgcttaggtttgctaatgcatgtggagccattacaactacgaagaaaggagctataccagctctacctacagtgtccgaggttcagactctcctcaatggaaactgatctacaagtctggattttgaatttcgcgttttacttttttctttttctttttgctttggtttggtgttcagacaactgtttgatcctggtatcaacctttttttattcaactgtcttcaagggtcttgtattttgtgtcactttaattaataaaaactcattaccaagtttag

SEQ ID NO: 1803 - DNA, 1182 bp, Lippia dulcis
cacacacaaactaatacttctctttttgtaacatcaatggcggcgaacggcagttcgattgatggcctgatcgtcagtttcggtgagatgttgatcgacttcgtgccgacggtctccggcgtgtcgctagcggatgcgcccggttttctcaaagcacctggcggcgctccggccaacgttgcaatagccgtggcgaggctcggcggaaaagcggcgttcctcggaaagctcggagacgacgaattcggccacatgctcgccggaatcctaaagaagaacggcgtgtccgccgacggtgtcaactttgacaccggcgcacggaccgcactcgcgttcgtgactctacgcgccgacggggagcgtgaatttatgttctacaggaatcccagcgccgatatgctgctcacgccagatgagttgaatctcgagctcattagatctgccaaagtattccactatggttcaataagcttgattgttgagccatgtagatcagcacatttaaaagcaatggaggtggcgaaggatgccggagcattgctctcgtatgaccccaatctccggctgccactttggccttcagcagaatatgctaaagagcagataatgagcatttgggataaagcagatgtgattaaggtgagcgatgttgagctagaattcctcactggaagcgataagattgatgatgaatccgcaatgtctttatggcacgacaacttgaagctccttttggtcactctcggagaaaagggttgcagatattatactaagcatttccgtggtgctgtggacgcctttcatgtcacggccgtagacacaactggagctggcgattcctttgtgggagcccttctcggaaaaattgttgacgaccatgtaatctttgaggatgagggaaggttgaaggaagtattgaaatatgcatgtgcatgtggagccataaccacaactaaaaagggtgcaatccccgctctccccactcacgccgaagtccaatctcttatcgatggatcacattagacaaataaacacaagttactgctacaattttttcttttctcttgaaaattattgctttgcgattcctctctctacttaaagttgacaattccaatttttacgttccttgtaattctgaaaccgttgcttatacggtggcttccaaataatgatgcatca

SEQ ID NO: 1804 - DNA, 1230 bp, Eutrema halophilum
acatccaaaatctctcataacctacattcactaccgtccgataaacactctcagaccacaaatggctacatccaacggcgagaaaagcttgatcgtgagcttcggtgagatgctcatcgatttcgttcccaccgtctccggcgtatccctcgctgaggctcctggcttcatcaaggcacccggcggcgcacctgccaacgtcgcgatcgccatctcccgactcggcggtcgctctgctttcgtcggaaaactcggtgacgacgagtttggtcacatgctcgccggaatcttgaaacaaaacggcgtctctgccgaaggtatcaatttcgacaccggagccaggacggcgctcgcatttgtcaccctaagagccgacggagaacgtgaattcatgttctaccggaaccctagcgccgatatgcttctccgtcccgatgagcttaatctcgatctcatcagatctgctaaggtgttccactatggatcaataagcctcatcgttgagccatgtcgatctgctcacttgaaggccatggaggtggctaaagaagcgggtgcgttgctctcgtatgacccaaacttgaggctgcctttgtggccctcgaaggaggaggctaagaagcagattcttagcatctgggacaaagctgaagtgatcaaagtcagcgacgaagagctcatgttcttgactggatctgataaggttgatgatgagactgctttgtcactgtggcactctaatctgaaacttctcttggtcactttgggtgaaaagggttgtagatattacaccaagggcttccgtggatctgttgatcctttccgtgtgaacacagtggatacaactggtgctggtgattcatatgtgggtgccttgctttgcaatattgttgatgaccgtgctgttctcgaggacgaagctcgtctacgagaagtacttaggtttgcgaatgcatgtggagccattacaactacgaagaaaggagcaattccagctctacccacagagtctgaggttcagggtcttctgaaaggaaactgatctacaaaaagtctggatttttaggatttcacgttgtcttttgcctttttttctgtttttttcaagcttttcgctgtgttcttgtagaacccatcagagaaccgttccaggagtattctgttaggagtgtctttttattgaactttcaagagtttgtcttttgggtcactttaatgaataaactcagt

SEQ ID NO: 1805 - DNA, 1253 bp, Arabidopsis lyrata
ctcccttactctccatttttctcgattctccgatttgatccaacgattcacagatctctgatctaatatggcatccaacggtgataaaggactgatcgttagcttcggcgagatgctaatcgatttcgtcccaaccgaatccggcgtctcactcgccgaagctcctggattcctcaaagctccaggcggtgctcccgcaaacgtcgcaatcgccgtttctcgtctcggtggacgatccgccttcgtcggaaaacttggagacgacgagttcggtcatatgttggctgggattctgaggaagaacggtgtcgatgatcaggggattaacttcgatacaggagctagaactgctctagctttcgttacgttacgtgctgatggagatcgtgagtttatgttttaccggaatcctagcgccgatatgcttctccgtcctgatgaactcaatctcgacctcatcagatccgcgaaagtgtttcactatggatcaataagtttgatagtggagccgtgtaggtcagctcatttgaaggccatggaagtggcgaaagaggccggagctcttctttcctatgatccaaacctcagggaacctttgtggccatcaaaggaagaagccaagacacagatcatgagcatctgggacaaagctgagatcatcaaggtgagcgatgttgagcttgagtttctaactggaagcaacaaaatcgatgatgagaccgcattgtccttgtggcatcccaacttgaagctcttgcttgttactctcggtgaaaagggctgtcggtattacaccaagactttcaaaggatctgttgaccctttccatgtgaacgctgtggatacaaccggagctggagattcctttgtcggtgctcttctaaaccagattgtggatgatcaatccgttctcgaggacgaagagagattgagaaaagtgctgagattcgcaaatgcttgtggagcaatcaccacgaccaagaaaggagccattccagctcttccctcagatgctgaagttcgcagctttcttgaaaagaaatagaaacaaaaacaactcaagcttctaccacgtaatctgtttccgcggctttcttctctttttgtattcttgttttcgaatggttgagatcaagaagagaaacgaattcagcattccgctctgtttttgttactcttcttcaaatgtaatgatttaaaaagacgtatgttgcaattcaaggcatcacttgctaataaaatgataaggtttt

SEQ ID NO: 1806 - DNA, 1236 bp, Arabidopsis thaliana
attatatccaaaacaaaatctcttttaactctctctattttgctcaatcttaatcgtccaatcaaaacactccgactaaaaatggctgcatctaacggcgagaaaagcttgatcgtgagcttcggtgaaatgctcatcgatttcgtcccaaccgtctccggtgtatccctcgccgatgctcctggcttcatcaaagcccctggtggtgcacctgccaacgttgccatcgccatttcccgtcttggcggtcgtgccgctttcgttggaaaactcggtgacgacgagttcggtcacatgctcgccggaatcttgaaacagaacggtgtctctgctgaaggtatcaatttcgacaccggagccaggactgcacttgcgttcgtgacactaagatctgatggagaacgtgagttcatgttctaccggaaccctagtgccgatatgctcctccgtcccgacgagctcaatcttgatgtcatcagatctgctaaggtgttccactacggatccataagcttgatcgttgagccatgtcgatctgctcacttgaaagccatggaggtggctaaggaagctggtgcgttgctttcatatgatccgaacttgaggcttcctttgtggccctcgaaggaggaggctcagaagcagattcttagcatctgggacaaagctgaagtgatcaaagtcagcgatgaagagcttatgttcttgactggatctgataaggttgatgatgagactgctttgtctctgtggcactctaatctgaaacttctcttggtcactctaggtgaaaagggttgtagttactacaccaagagcttccgtggatctgttgatcccttccatgtggatgcagtagatacaactggtgctggtgattcatttgttggtgcattgctttgcaagattgttgatgaccgtgctgtgcttgaggacgaagctcggctgagagaagtgcttaggtttgcgaatgcttgtggagccatcacaacaacaaagaaaggagctattccagctctccctacagagtctgaagttcagagcctcctgaaaggaaactgatttcacaatgtctggatttttaggatttcaagttttaccttttcttggctttgttttttattttcccctgcttttggctctgtgttcttgtagaaccgttctattctgttatgaatctcgttttattccaattgcaaggttttttgtcgtttgagtaactttgatgaataaaaa

SEQ ID NO: 1807 - DNA, 1354 bp, Olea europaea
tctgatttatatatacaatcgtgtcttcagtttctgaatcatcgtaatggcttcaaacggcagttcagatggcctgatcgtgagtttcggtgagatgttaatcgattttgtgccgacggtctccggcgtgtcgttggcggaggcgccgggattcttgaaggcacctggtggagctccggccaacgtggcgatagcggtggcgaggcttggcggaaaggccgccttcatcggaaaactcggtgaggatgagttcggtcacatgctcgccggtatcttgaaggaaaacggtgtctccgccgatggcatccccttcgataaaggtgcacgcaccgccctagctttcgtcaccttacgcgccgatggagatcgtgaattcatgttctataggaatcccagtgctgacatgttgctcactcccgatgaattgaatctcgagctcattagatctgctaaagtgttccattatggatcgataagcttgatcgtggagccatgtagatctgcacatttgaaggcaatggaggtggccaaggatgccggggcattgctctcatatgaccccaacctccggctgccattgtggccctcagctgacgaggcccgaacgcaaatcatgaacatttgggacaaggcggatgtgatcaagatcagtgatgttgaactagagttcctcacggggaataacaaaattgatgatgcttcggcaatgtccctatggcatgataacttgaagcttctcttggtgacccttggagaaaatggctgcagatattacactaagaatttccatggatcagttgatgccttccacgtcaaggctgtggacacaaccggggctggcgattcttttgtaggagcccttctctgtaagattgtcaacgatcatgacataatccaggatgagcttagattgaaggaagtacttaaatttgcatgtgcctgtggagcaatcaccacgactaaaaagggagccatcccagctctcccaaccgagaaagaagtcctcgctcttcttaaagaaggaaaatagaggaaagatgtcttcctttcctaattttgatttttaccatgtttttctagacaagttttgaatttggatttggcaattggtatctctgtttcagtttttctttatgtgcttgatatgatgaaataatttctttaaggtagttaaataaataatgatctgtcattttcttttgataaatgcttgtggcttgcagttgcagcgatcattgaaatcttctttttccttttcctacagttgttatccagctcattctggtcaaatatctttatcaataattaaatccgcttaattaggcactttttattgaaatgcgactctgagcct

SEQ ID NO: 1808 - DNA, 1320 bp, Echinacea purpurea
cggccgggggaccctcaccatcgtctctttcctcttaaaccacctgcaacttttttttctctctcaaactcatcaatggcggctaccaatggagccatcaacaacgaccaaagcctgatcgtcagcttcggagagatgctgatcgacttcgtccccaccgtctccggcgtatcactagcagaggcgccgggattcctcaaagcaccaggcggtgctccggctaacgtcgcgatcgccgtcgcaaggctcggcggaaaatcggccttcgtcggaaagttaggcgacgatgagttcggacacatgctcgccgggatcttgaaggagaacggcgtctccggcgacggaattaattttgataaaggtgcacggacggcgttggcgtttgtgacgttgaaagcggacggtgagcgtgagtttatgttctaccggaaccctagcgccgatatgctgttgacgcctgatgaacttaacctcgagcttattagatctgcaaaagttttccattacgggtcaataagcttgatagtggagccctgcagatcagcacatcttaaagcaatggaggttgcaaaggaagcaggggcacttttgtcatatgacccaaatctccggctgccattgtggccatcagcagaggaggcacgtgagcaaatcatgagcatatgggataaggctgaggtgatcaaagtgagtgataacgagcttgaatttctcacaggaagtgacaagattgatgatgagtcagcaatgtctttgtggcaccctaatttgaagcttctgttggttactcttggtgacaaaggttgcaattactacaccaagcattttcatggtactgtgggtgcattccacgtgaaagcagtggacacaacgggtgcaggtgactcttttgttggtgctctcttgacaaagatagttgatgaccaatccgtgctagaggatgaagcaaggttgaaagaaatactgagatacgcgtgtgcttgtggagcgatcacgaccaccaaaaagggtgcaattccggcccttcctacagtaccagagcttgacgcctttctgaaagcgcatcattagatgatattttcatcgtctgttttgtttttggtgttcttgatcgaataataaaatttctttgaaatgattttgtattatcatcaatcaatgtttaaagaaacaaaaattggtttgcaaaaggttgaagaatttgagtgatttagtgattgtcaactggtagtttcttgttggtatgtttgtttggattgttttgttttaattactaaattttcaatgatgctacaacataaagcgtggttcttgatgcaa

SEQ ID NO: 1809 - DNA, 1215 bp, Arabidopsis lyrata
ttatatccaaaacctaatctctctctctctgctcaatcttaatcgtccgatcaaaacactacgacgacaaatggcagcatccaacggtgagaaaagcttgatcgtgagtttcggtgaaatgctcatcgatttcgtcccaactgtctccggcgtatccctcgccgacgctcctggcttcatcaaagcccctggtggtgcacctgccaacgttgctatcgccatatcccgtcttggcggtcgtgccgctttcgtcgggaaacttggtgatgacgagttcggtcacatgctcgccggaatcttgaaacagaacggcgtctctgccgaaggtatcaatttcgacaccggagccaggactgcacttgcgttcgtgacactaaaatctgacggagaacgtgagttcatgttctaccggaaccctagtgctgatatgctcctccgtcccgacgaactcaatcttgatctcatcagatctgctaaggtgttccactacggatccataagcttgatcgttgagccatgtcgatctgctcacctgaaagccatggaggtggctaaagaagctggtgcgttgctctcttatgatccgaacttgaggcttcctttgtggccctccaaggaggaggctcagaagcagattcttagcatctgggacaaagctgaagtgatcaaagtcagcgatgaagagcttatgttcttgactggatctgataaggttgatgacgagactgctttgtctctgtggcactctaatctgaaacttcttttggtcactctaggtgataagggttgtagatactacacaaagagcttccgtggatctgttgatcctttccatgtgaacgcagtggatacaacaggtgctggtgattcatatgttggtgccttgctttgcaagattgttgatgaccgtgctgtgcttgaggacgaagctcgtctgagagaagtgcttaggtatgcaaatgcttgtggagccatcacaacaacaaagaaaggagcaattccagctctccctacagagtctgaagttcagagtctcctgaaaggaaactgattagcaaattgtctggatttttaggatttcacgttttagtttctttgttggctttttttttttgtttcttctgcttttcgctctgtgttcttgtaccagagaaccgttctattctattatgaatccccttttattccacattcaagggttttgggttactttga

SEQ ID NO: 1810 - DNA, 1165 bp, Sesamum indicum
cgcttctccgttttctcctgtcttctcccattttcttcgctgtatacacctactaatacacacacatacgtagaagagatcgtatagtttttgcttcggattattgttggatagcaatggcggcgagcaacggcgcttcgagcaacggtctgatcgtcagttttggtgagatgttgatcgacttcgtcccgacggtgtcgggggtgtcgctggcggaggcgccggggttcctgaaggctcccggcggcgccccggccaacgtcgccatagccgtcgcaaggctcggcgggaaggccgcgtttgtcggcaagcttggggacgatgagttcggccacatgctcgctgggatcctgaaggagaacggcgtgtctgccgatggtgtgaactttgacaaaggtgcgcgcactgctctggcgtttgtgaccctacgcgccgacggagagcgtgagttcatgttctataggaatcccagcgctgacatgctgctcacccccgatgagttgaatctcgaactcattagatctgctaaagtgttccattatggatcaataagcttgatcgtggagccatgcagatcagcgcatttgaaagccatggaagtggccaagagcgctggagcattgctttcttatgaccccaacctccggctgccgctgtggccgtcagctgagtatgctaaagagcaaataaagagcatttggaataaagcagatgtgatcaaggtcagtgatgaggagctcgtatttctcaccggaagcgataaggttgatgatgaatccgccatgtccctatggcacgacaacttgaagctcctcttagttacacttggagccaagggttgcagatattataccaagaattttcggggagctgtggaagggtttgcagtgaagacagtagacacaactggggcaggtgattcctttgtgggagccctccttgggaagattgttgacgaccattcaataatccaggacgaaacgaggttgaaggaagcattgaagtatgcatgtgcatgtggagcaataaccacgactaaaaagggtgcaatcccagctcttccagcacactccgaggtcctttccgttctcaatggaccaaaatagaggaattgccagttgcctcaagtagttgttttcctttattttggtccattgagaacgga

SEQ ID NO: 1811 - DNA, 1138 bp, Citrullus lanatus
aattcaccattcatatctccctctcttactctctttcaaatttcctgatcactctctctatcaacattttctttctttctccgatggctcccaataacggcgctttgcctactggctccggtttgatcgtcagtttcggcgagatgttgatcgatttcgtcccgacggtttccggcgtatctctggctgaggcgccgggatttcttaaggctcccggcggcgctccggcgaacgttgcgatcgctgttagccgcctcggcggtcgcgctgccttcgtaggaaagctcggcgaagatgaatttggccgtatgttagaaggaatagtgaaggagaacggtgttgacgccagtgggatccgcttcgatcaaggggctagaaccgccttggctttcgtcactctacgcgctgatggtgagcgtgagtttatgttctaccggaaccctagcgccgatatgcttctcaagccggaggaattggatctcgaactcatcagatccgccaaaatctttcactatggatccataagcttgatcgtggagccctgcagatcggcacatattaaggcaatggaggaagccaagaaagcaggtgttctactttcatacgatcccaatttgaggctgcctctgtggccctctgcaaatgaggcccgtgaacagatcaagagcatttggaacaaggccgacatcatcaaggtcagtgacgaggaactcaaattcctcacccagaacgaaaaggtcgatgacgaagccgccatgtctctctggcacgatggcttgaagctcctcctcgtcactctcggtgagcagggctgccgatactacaccaagaacttccgcggctccgtggatcctttcaaggttaaggctgttgacacaactggagctggtgactcattcgttggtgctcttctttgcaagattgttgacgaccaatccgtgcttcaggatgagaagaagttgagggagatcctgaagtttgctaacgcttgtggagccattacaacaaccaagaaaggagccattccagcacttccatcggaggctgacgtggcagctttgatcaaggcttcttcttaggctgcatagagatctttttttttttttttttttttttttttttttttttttttttttat

SEQ ID NO: 1812 - DNA, 1216 bp, Brassica rapa
tccaaacacttctcatatccaaaactaatctctaccatcaaataaaacacattccgaccacaaaatggcagcatccaacggcgagaaaagcttgatcgtgagcttcggtgagatgctcatcgacttcgttcccaccgtctccggcgtctcactcgccgaggctcctggcttcatcaaggcccccggtggcccacctgccaacgtcgccatcgccgtttctcgtctcggtggtcgcgctgcttttgtcggaaagctcggtgacgacgagttcggtcacatgctcgccggaatcttgaaacaaaacggcgtttccgccgaaggaatcaactttgacaccggagctaggaccgcactggcgttcgtgacgctaagatccgacggagaacgtgacttcatgttttaccggaaccctagcgccgatatgctcctccgtcccgatgagcttaatctcgatctcatcaaatctgctaaggtgtttcactatggatcaataagcctcatcgttgagccatgtagatctgctcacctgaaggctatggaagtggctaaagaagctggtgcgttactctcttacgacccaaacttgaggctgcctttgtggccctcgaaggaggaggctaagaagcagattcttagtatctgggacaaagccgaagtgatcaaagtcagtgatgaagagcttatgtttttgactggatctgataacgttgatgatgagacagctttgtctctgtggcatgataacttgaaacttctcttggtcactttgggtgaaaagggttgtaaatattacacaaagagtttccgtggatctgttgatcctttccatgttaacacagtggatacaactggagctggtgattcatttgttggtgccttgctttgcaacattgttgatgaccgctctgttcttgaggaggaagctcgtctaagagaagtgcttaggtttgcgaatgcatgtggagccattacaactaccaagaaaggagctataccagctctacctacagtgtctgaggttcagactctcctcaatggaaactgatttacaacaaaacaagtctggattttgaatttcactttttctttttgcttttggtttggtgttcagacaactgtttgatcctggtatcgatcttgttttattaattcaactgtcttcaagggtcttgtattttgtgtcactttaattaataaaaactcattaccaagttta

SEQ ID NO: 1813 - DNA, 1016 bp, Brassica napus
ccacaaatgactacttccaacggcgagaaaagcttgatcgtttccttcggcgagatgctcatcgacttcgtccccaccgtctccggcgtttccctcgccgaggctcctggcttcatcaaggcccccggtggcgcacctgccaacgtcgccatcgccgtttcccgtctcggcggtcgcgctgcttttgtcggaaagctaggtgacgacgagtttggtcacatgctcgccggaatcttgaaacaaaacggcgtctctgccgaaggtatcaacttcgatactggagctaggacggcgcttgcgttcgtgacgcttagatccgatggagaacgtgagttcatgttttaccggaaccctagcgccgacatgctcctccgtcctgatgaactcaatcttgatctcatcaaatctgctaaggtgtttcactatggatcaataagcctcatcgttgagccatgtagatctgcacacctgaaagccatggaggtagctaaagaatccggtgcgttgctctcgtacgacccaaacttgaggctgccattgtggccctcgaaggaggaggctaagaagcagattcttagcattgggaacaaagctgaagtgatcaaagtcagcgaagaagagcttatgttcttgactgggtctgataacgttgatgatgagactgctttgtctctgtggcattctaacttgaagcttctcttggtcactttgggtgaaaagggttgtaactattacaccaagagcttccgtggatctgttgatcctttccatgtgaacgcggtggatacaaccggtgctggtgattcatacgttggtgccttgctttgtaacattgttgacgaccgctctgttctggaggacgaagctcgtcttagagaagtgcttaggtttgcgaacgcatgtggagccattacgactacaaagaaaggagctattccagctcttcctacagaatccgaggttcagagtctcctgaatggaaactaatctaggagtctaggacatgtctggtctta

SEQ ID NO: 1814 - DNA, 1067 bp, Petunia hybrida
atacacacacatacaaatatttgtctctatacaactcaagcaacatggcaactaacggtgttaacaattctagtggtttgatcgtgagtttcggtgagatgttgatcgactttgttccaacagtttctggagtttccttagcggaagctccaggattcgttaaagcacccggtggtgcaccggcgaacgttgccattgccgtaacacggctaggtggcaaatctgcgttcatgggaaaacttggtgacgatgagtttggtcatatgcttgctggaatattaaaggagaatggtgttaatgcagaagggatcaactttgatgaaggcgcaagaactgcattggcgttcgtgacactacgtgctgatggagaacgtgagttcatgttttataggaatccaagtgctgatatgttgttgacgcccgaagagttgaatcttgacgttattagatctgctaaggtattccactatggatcaataagtttgatcgtagagccatgcagatcagcacatttgaaggcaatggaggtggcaaaggaggctggggcgttgttgtcatatgaccccaatctccgtctaccactgtggccctccgcggaggaggccaagaagcagattctaagcatttgggacaaagcagatgtgatcaaggtcagtgatgaagagctggaattcctaactggaagtgacaagattgatgatgagtctgctatgtccttgtggcatcccaatttgaagcttctccttgttacccttggtgccaagggctgtaaatattacaccaagaatttccacggaggggttgagggattccatgtcaaaacagttgatacaacaggagctggcgattcttttgttggtgctcttttgacaaagattgtcgatgatcaatccatcatcgaggatgaagcaaggttgaaggaagttcttacgtttgcatgtgcatgtggagccattaccactaccaagaaaggagcaattccagctcttcctactgaatctgaagcccttgctctgctaaaagaggacaatagatacaaacatgccattactttatcccccttttgc

SEQ ID NO: 1815 - DNA, 1685 bp, Populus trichocarpa
ctataaattaagctctcttcccctgggaaatctctctctcctttccctctctataaacacgcaaatctatcctccctccctctcgttctcctgcaatggcttccaatggcgtgaacgacaagtcactgatcgtgagcttcggcgagatgctaatagatttcgtcccgaccacctccggcgtctccctcgctgaagccccggggtttctgaaagcaccgggtggtgctccggcgaacgtggcgatcgcggtggcgaggctaggaggaaagtcggcgtttgtcggaaagcttggtgacgatgagttcggtcacatgctcgccgggattttgaaagaaaacgacgtgatcgcttccggtattaattttgacacaggtgcaaggactgctctcgcgtttgttaccctacgcgctgatggagagcgtgagtttatgttttataggaatccaagtgctgatatgttgctaaggcccgaagagttaaatcttgagttaataagatctgctaaggtgttccactatggatcaataagtttgattgttgagccatgcagatcagcacatctagaggcaatgaaggtggcgaaggaagcaggtgcattgctttcctatgacccaaatctgaggctgccattgtggccatcagcggaggaggcgcgtgagcagatattgaagatctgggacgaggcagatgtgatcaaagtcagtgatgtcgagcttgagttcctcactggaagtaataaaattgatgacgaaactgctttgacactttggcgtcctaactttaagttgctcttggtcacccttggtgaaaacggttgcaaatattacaccaaggctttccatggaactgttgaggctttccatgtcgagactattgataccacaggtgctggtgactcattcatcggagcactcctttgcaagattgttgatgaccaatctgtactggaggatgaacagaagttgagagagatactaagatttgcaaatgcatgtggagccatcacaaccaccaaaaagggcgcaatccctgcccttcctaccccgtccgaggtccacaaattgctgaacgcatcaaagtagaccttttttttttttttttttaatttgctctgcagtccttcgatcttccctctttgctttttttaggtcttggttctccggtttaggttgcttgctattcaattgaagagcggcttcaatctcaaaatctcaccttttttccctcttcaatgtattttgatgaaaaagacttgctgcaaggtcttgccaaataaaattcttcagcggtttttactttctcctctccaagtatttaatcaatgattgatccattaatttgatttaaaagttacttttataaaccaaacttcaaactcctaaataactgaattgggcaaatttcaatatcaaaataacattttaatatttatttaaaaagaaaaactaggtttcaatcttctataaaaggttagaaaccaactaggtttcaatccactcaatcaagcagccgggctgcgggttgactcggtaagctttaataccaagtccaggttagggcgggcaagtatagcaatactgctccgaacatgagatggcagtccatctgttttaggttcttactggcttctcattcagccataaccattgtatgattcatcatgatttgttcattaaatttgctcc

SEQ ID NO: 1816 - DNA, 1140 bp, Tripterygium wilfordii
gccggcgagtccagtggctctctgatcgtcagcttcggagagatgttgatcgactttgtgcctacggtttccggagtctcactggcggaggcaccgggatttctcaaggctcccggtggcgcaccggctaatgttgcaatcgccgtcgccagactcggcggtcatgcggccttcgtcggtaagcttggcgatgacgagttcggacgtatgctcgccgggatcctcgatgagaacggtgtcagcacgaaagggatcaacttcgatcaaggagcccgcactgccttagcgttcgttactctacgcgctgacggagagcgtgagttcatgttttacaggaatcctagcgccgacatgctcttgacgccggaagagctcaatctcgagctcattagatccgcgaaggcgttccattacgggtcgataagcttgattgtggagccatgcagatcagcacatctgaaggcaatggaggccgcaaaagatgctggtgcactgctctcgtacgacccgaacttaaggcttccgctgtggccctcaccggcggaggcacgtgagcagataatgagcatctgggacaaggcagaggtgataaaggttagtgatgttgagctggagttcttgacagggagtgataaaattgatgatgcggatgctttgtctctgtggcaccccaacttgaaacttcttttggtcactcttggcgagaagggttgtagatactacaccaagaacttccatgggcaagtagatgctttccatgtgaaagctgtagatacaacaggagcaggtgatgcattcgttggagccttattatgcaagatagttgatgaccaatctgtaattgaggacgaagcaaggctgagggaagtattgaaatttgcaaatggatgtggtgccattacaactaccaagaagggagccattcctgctcttccaaccgcatccgaggtcctcaatttagtcaaaggggcttagatgcttcttcttcttctttttccgtttttttaaagctattcttcttaaaccttatcttttctctctatttttctcttctggctagtcaatggggcttttgagtctcttttagtgattgaaaacttgtgggttttcgtttaactgtaataaattttgatttgggct

SEQ ID NO: 1817 - DNA, 1155 bp, Brassica napus
ccacaaatggcagcatccaacggcgagaaaagcttgatcgtgagcttcggtgagatgctcatcgacttcgttcccaccgtctccggcgtctcactcgccgaggctcctggcttcatcaaggcccccggtggcgcacctgccaacgtcgccatcgccgtttctcgtctcggtggtcgcgctgcttttgtcggaaagctcggtgacgacgagttcggtcacatgctcgccggaatcttgaaacaaaacggtgtctccgccgaaggaatcaactttgacaccggagctaggaccgcactggcgttcgtgacgctaagatccgacggagaacgtgagttcatgttttaccggaaccctagcgccgatatgctcctccgtcccgatgagcttaatctcgatctcatcaaatctgctaaggtgtttcactatggatcaataagcctcatcgttgagccatgtagatctgctcacctgaaggcaatggaggtggctaaagaagctggtgcgttgctctcttacgacccaaacttgaggctgcctttgtggccctcgaaggaggaggctaagaagcagattcttagcatctgggacaaagccgaactgatcaaagtcagtgatgaagagcttatgtttttgactggatctgataacgttgatgatgagacagcttgtctctgtggcatgataacttgaaacttctcttggtcactttgggtgaaaagggttgtaaatattacaccaagagcttccgtggatctgttgatcctttccatgttaacacagtggatacaactggagctggtgcttcaccttgttggtgccttgctttgcaacattgttgatgaccgctctgttcttgaggaggaagctcgtctaagagaagtgcttaggtttgctaatgcatgtggagccattacaactaccaagaaaggagctataccagctctacctacagtgtctgaggttcagactctcctcattggaaactgatctacaagtctggattttgaatttcgcgttttactttttactttttgctatggtttggtgttcagacaactgtttgatcctggtatcaaccttttttgattcaactgtcttcaagggtcttgtattttgtgtcaccttaattaataagaactcgttaccaagtttaac

SEQ ID NO: 1818 - DNA, 1232 bp, Brassica oleracea
tctccctctgttctctaattctctaacacactcatcccacaaatggctacatccaccggcgagaaaagcttgatcgtttcattcggcgagatgctcatcgacttcgtccccaccgtctccggcgtatccctcgctgaagctcctggcttcatcaaggcccccggtggcgcacctgccaacgtcgccatcgccgtttcccgtctcggtggccgagctgcttttgtcggaaagctaggtgacgacgagtttggccacatgctcgccggaatcttgaaacaaaacggcgtatctgccgaaggtatcaacttcgatactggagctaggacggcgcttgcgttcgtgacgttaagatccgatggtgaacgtgagttcatgttctaccggaaccctagcgccgacatgctcctccgtcctgatgaactcaatctcgatctcatcaaatctgctaaggtgttccactatggatcaataagccttatcgttgagccatgtagatctgctcatctgaaagccatggaggtggctaaagaagctggtgcgttgctctcgtacgacccaaacctgaggctgccattgtggccctcgaaggaggaggctaagaaacagatccttagcatctgggacaaagctgaagtgatcaaagtcagcgacgaagagcttatgttcttgactgggtctgataatgctgatgatgagactgctttgtctctgtggcatgataacttgaaacttctcttggtcactttgggtgaaaagggttgtaactattacaccaagagcttccgtggatctgttgatcctttccatgtgaacgcagtggatacaactggtgctggtgattcatatgttggtgccttgctttgcaacattgttgatgaccgctctgttctcgaggacgaagctcgtcttagagaagtgcttaggtttgcgaatgcatgtggagccattacgactacaaagaaaggagctattccagctcttcctacagaatctgaggttcagagtctcctcaatggaaactgatctaggagtctaggacatgtctggtcttacgatttcacgtttttttaatttccttttgttttcgttcagtgttcagagaacagtttgattctgttaagtactgttttctattttgagtgactttcataaattaaaactcattaccaagtttagtgaacgattgtttattaagagccacttttgattttaatgagaaacaacaatacatt

SEQ ID NO: 1819 - DNA, 1323 bp, Beta vulgaris
tctctttctctctcctctcaacaatggcggaacttaacaatggcggacattccaaaggattagtcgtaagcttcggcgagatgttaatcgacttcgtccctacatcttccggcgtttccctcgcagaagcgccgggattcctcaaagctcccggtggtgctccggcgaacgttgcgatcgctgtttctcgcctcggcggaaacgccgctttcgtcggaaaactcggtgacgatgaattcggacacatgctcgccggaatccttaagaaaaacggcgtttctgctgacggtttgagcttcgataaaggcgctagaactgcgcttgctttcgtcactttgaaatctgacggtgaaagagagttcatgttttaccggaaccctagcgccgacatgcttctcactcccgacgagcttaacctcgatctcattcgatcggctaaggtgttccattatggatcaattaggttgattgtggagccctgtagatcagcacatttgaaagcgatggaggaagccaaaaaggccggagctttgctttcatatgatccaaacctacggctgccattgtggccttctgcagaggaggctcgcgagcagatcatgagcatttgggataaggcagaggtgatcaaggtcagcgataacgagttggaattccttacaggaaactccacaatagatgatgctacagcaatgtcattgtggcaccctaacttaaagcttctcttggtcactcttggcgaccagggttgcagatactacaccaagaatttcaagggaagcttggatggatttaaggtgaatgcagttgacaccactggtgctggtgactccttcgttggtgcattgctaaacaagatcgtcgatgaccattctatcatcgaggacgaatcaagattgaaagaggtgttgaaattcgctaacgcatgtggagctattacaaccacgaagaagggagccatcccagcacttcctacagttgctgatgcgctagagcttattaagaagaacgcttcttaagtcttaatgcgtttcatattatagcattggtcctttatcaacttggttgggttctttgtcttaattttttaggggggttagatcactaggtacggttagggagttcctccggattttccaggatttgatttgattaccaaattgaaagagagcggggccaaaaccttaacagtggaatccccctttctaaattttcccccataatatgtaatatgataagcttaagtctttgaaagcgtaatcataaataaatattctcgttgtgcgtctttttgcaattcaaagaggcagttttagtcgtttt

SEQ ID NO: 1820 - DNA, 1143 bp, Euonymus alatus
gtagttataaattaaatgacagtcaatcagttagtcgattaccacaaaattgaacccaaaataaaataatcatctctatataaaccctctcccatacacagatttggctctctcccggtctctctcttcctctcgattacgaattatcttcaaatcaatggcttcaaaggcggttcacaacggcgagtccgcaggttctctgatcgtcagcttcggcgagatgctgatcgacttcgtgccgaccgtttccggcgtctcactggcggaggctccgggatttctaaaggcccccggcggtgcaccggctaatgtagcaatcgcagtcgccagactcggaggccatgcggcgttcgtcggcaaactaggcgatgacgaatttggtcacatgctcgccgggatcctcggcgagaacggcgtcagcaccaaagggatcaacttcgatctaggcgctcgcactgccttagcgttcgtgactctacgcgccgacggggagcgtgagttcatgttctacagaaatcctagcgccgacatgctgttgacgcccgaagagctcaatctcgagctcattagatccgcgaaagtgttccattacggatcgataagtttgattgtggagccatgcagatcagcacatctgaaggcaatggaagccgcaaaagaggcgggtgccctgctctcgtacgacccaaacttgaggctgccgctgtggccttcacctgaggtggcgcgtgagcagataatgagcatatgggacaaggcggaggtgatcaaggtcagtgatgttgagctggagttcttaacagggagtaacaaaattgatgatgcagatgctctatcactgtggcaccccaacttgaagcttcttttggtcactcttggtgagaaaggttgcagatattacaccaagaacttccacggtcaagttggtgctttcaatgtggaagctgtagatacaacaggagcaggtgatgctttcgttggagcattattgtccaagatagttgatgatcaatctgtaattgaggacgaatcaaggctgagggaagtactcaaatttgcaaatgcatgtggtgccattacaaccaccaagaaaggagccattcctgctcttccaaccacatccgaggtcctcacttttgtcaa

SEQ ID NO: 1821 - DNA, 1213 bp, Helianthus annuus
tcatctctttcctcttaaaaaacctgcaacttttttcttctctcaagctcatcaatggcggccaccaatggagtcaccgacaaaaaactgatcgtcagcttcggcgagatgctaatcgacttcgtccccaccgtctccggcgtctcactagcagaagcaccgggattcctgaaagcaccaggcggcgctccggcgaacgtcgcgatcgccgtctcacggctcggcggcgacgcggcgttcgtcggaaagttaggcgacgatgagttcggtcacatgctcgccgggatcttgaaggagaacggtgtctccggtgagggaatttgctttgataaaggtgcgagaactgcgttggcgtttgttacgttgaaatcggacggtgatcgtgagtttatgttttaccggaaccctagcgccgatatgttgttgacgccggaggagctgaaccttgagattattagatctgcaaaagttttccattacggatcaataagtttgatcgtggagccatgcagatcagcacatctgaaagcaatggaagttgcaaaggaagcaggggcgcttctgtcatatgacccaaatctccggctgccattgtggccatcagccgaggaggcacgcgagcaaatcatgagcatatgggaaaaggctgaggtgatcaaagtgagtgataacgagcttgaattcctcaccggaagtgacaagattgatgatgagtcagcaatgtctttgtggcaccctaatttgaagcttctgttggttactcttggtgacaaaggttgcaattactacaccaagcattttcatggtactgtgggtgcattcccagtgaaagcagtggacacaacaggtgctggtgactcttttgttggcgctctcctgacaaagatcgttgatgaccaatccgtgctcgaggatgaagcaaggttgaaagaaatactgagatactcgtgtgcctgtggagcgatcactaccaccaaaaagggtgcgatccctgcccttcctaccgtgccagagctcgacgcctttctgaaggctcatccttagatagtattttcgtcgtctgttttgtttttgttttcttgatcgaataataaaatttctttgaaatgattttgtattatcatcaatcaatgtttaaagaaacagaaatcggtttgtaaaaggttgaagaatttgagtgattaagtgattttcaaccctagtttacttgttg

SEQ ID NO: 1822 - DNA, 1276 bp, Arabidopsis thaliana
atgtattcttctccttgtccttccttactctctatatttttctcaattctccgatttgatccaacgatttcacagatctctgatctaaatggcatccaacggtgataaaggactgatcgttagcttcggcgagatgctaatcgatttcgtccctaccgaatcaggcgtctctctcgccgaagctcctggattcctcaaagctccaggcggtgctcccgctaacgtcgcaatcgctgtttctcgtctcggtggacgatctgctttcgtcggaaaacttggagacgacgagttcggtcatatgttggctgggattttgaggaagaacggtgttgatgatcaggggattaacttcgatactggagctagaactgctttagctttcgttacgttacgtgctgatggagatcgtgagtttatgttttaccgcaatcctagcgccgatatgcttcttcgtcctgatgaactcaatctcgacctcatcagatccgcgaaagtgtttcactatggatcaataagtttgatagtggagccgtgtaggtcagctcatttgaaggccatggaagtggcgaaagaagcaggagctcttctttcctatgacccaaacctcagggagcctctgtggccatcaaaagaagaagccaaaacacagatcatgagcatttgggacaaagctgagatcatcaaggtgagcgatgttgagcttgagtttctaactggaagcaacaagattgatgatgagaccgcgttgaccttgtggcatcccaacttgaagctgttgttagtcactcttggtgaaaagggctgtcggtattacaccaagactttcaaaggagccgttgaccctttccatgtgaacgctgtggacacaaccggagctggagattcctttgtcggtgctcttctaaaccagattgtcgatgatcgatccgttctcgaggacgaagagagattgaggaaagtgctgagattcgcaaatgcttgtggagcaatcacaacgaccaaaaaaggagccattccagctcttccctcagatgctgaagttcggagctttctcgaaaagaaatagaaacaaaacaactcaagcttctattacgtaatctgtttccgcgattatcttctctttttgtattcttgttttcggatggttgaatcgagaagagaaacaaattcggcattccgctctgtttttgtttctcttcttcaaatgtaatgatttagaaaagacgtatgttgcaatttaaggcttcacttgctaataaaatgataaggtttttcc

SEQ ID NO: 1823 - DNA, 1147 bp, Arnica chamissonis
tcttacaaatttttctttctcaaatcagtaatggccgccaacaatggagtcgtcaaacacgacggaggattgatcgtcagcttcggcgagatgttgattgactttgtgcctaccgtctccggcgtatcgttagcagaggcgccgggatttttgaaggcaccaggtggtgctccggcgaacgttgcgatcgctgtgtcaagactaggtggaaaatcggccttcgtaggtaagttaggagacgatgagttcgggcacatgctcgccgggatcttgaaggagaacggcgtctccggcgaaggaatcaatttcgataaaggagcacggactgctctggcgtttgttacactgaaagccgacggcgatcgtgagtttatgttctaccggaaccctagcgccgatatgttattgactcccgatgaactcaaccttgaactcattagatctgcaaaagttttccattacgggtcaataagcttgatagtggagccctgcagatcagcacatcttaaagcaatggaggttgcaaaggatgcaggggcacttctgtcatatgacccgaatctccggctgccattgtggccctcagcagaggaggcacgtgagcagatcatgagcatatgggataaggctgaggtgatcaaagtgagtgataacgagcttgaatttctcacaggaagtgacaagattgatgacgagtcagcaatgtctttgtggcaccctaatttgaagcttctgttggtcactcttggtgacaaaggttgcaattactacaccaagcattttcatgggacggtgggtgcattcccagtgaaagcagtggacacaaccggtgcaggtgactcttttgttggtgctctcctaacaaagatcgttgatgaccaatccgtgctagaggatgaaggaaagctgaaagagatattgagatactcgtgtgcgtgtggagcgatcacgaccaccaaaaagggtgcgatcccggcccttcctactgtgccggaggttgacgcctttctgaattcgcatcattagaaaatatttccatcgtctgttttgttcttgtttcttgatcgaataataaaagtttcattgaaatcgattttgtattatcattaatcaatgtttaaagaaacagaaattggtttgcaaaagg

SEQ ID NO: 1824 - DNA, 1040 bp, Brassica oleracea
ataacataaacactctccgaccacaaaatgtctacatccaacggcgagaaaagcttgatcgtgagcttcggcgagatgctcatcgactttgtccccactgtctccggcgtatccctctctgaggctcctggcttcatcaaggctcccggtggtgcacctgccaacgttgccattgctgtcgctcgtctcggtggccgtgctgcttttgtcggaaagctcggtgacgatgagtttggtcacatgctcgccgggatcttgaaacaaaacggtgtctccgccgacgggatcaactttgatactggagctaggacggcgcttgcgttcgtgacgcttagatctgatggagaacgtgagttcatgttttaccggaaccctagcgccgacatgctcctccgtcctgatgagcttaacctcgatctcatcagatctgctaaggtgtttcactatggatcaataagtctcatcgtagagccatgtagatctgctcacctgaaggccatggaggtggctaaagaagctggtgcgttgctctcttatgacccaaacttgaggctacctttgtggccttccaaggaggaggctaagaagcagattcttagcatctgggacaaagctgaagtgatcaaagtcagcgatgaagagcttatgttcttgactggatctgataacgttgatgatgagactgctctgtctctgtggcatgataacttgaaacttctcttggtcactttgggtgaaaagggttgtaattattacaccaagagcttccgtggatctgttgatcctttccatgtggacgctgtggacacaactggtgctggtgattcatatgttggtgccttgctttgcaacattgttgatgaccgctctgttcttgaggatgaagctcgtcttagagaagtgctcaggtttgcaaatgcatgtggagccattacaactaccaagaaaggagcaattccagctcttcccacagtgtctgaagttcaagctctcctgaatggaaactgatctacaacaagtctggaattttaagatttcac

SEQ ID NO: 1825 - DNA, 1400 bp, Panax ginseng
aagcagtggtatcaacgcagagtacatggggctctctctctatatctattttttctctctatatatctatatatacttacaataaccaattattctctctctatatatatctatacatatagacatattttctctctaaaagtaatatcatcatatggccattaatggagtctcacctaccggaggattggtcgtcagcttcggcgagatgctgatcgacttcgttcccactgtctccggcgtgtctctggctgatgcgccaggtttcctcaaggcgccgggcggagctccggctaacgtggcgatcgccgtttcgaggctcggtggaaaggcggcgttcgtcggaaaactcggcgacgacgagttcgggcagatgctcgccagaattctcaagcaaaatggcgtctccgccgacggggtcaacttcgacaagggcgccaggacggccttggcgttcgtgacgctacgcgccgacggagagcgtgagtttatgttttaccggaatcctagcgccgacatgttactgacgccggacgagttgaatctcgaacttattagatctgctaaagttttccattatggatccataagtttgatcgtagagccgtgcagatcatcacatttgaaggcaatggaggaagcaaaggaagcgggtgccctgctctcctacgacccaaacctccggctaccactgtggccatcagctgaggaggcacgcgagaagatcttgagcatttgggacaaggctgatgtgatcaaggtcagtgacaatgagctggagttcctcactggtaaagaggtaagtgacgaggcagcaatgtccctgtggcaccctaatttgaagcttcttctggtgacccttggagagaaaggctgcagttattacaccaagaatttccatggatctgtccctgggtttcatgtcaagacagtggatacaactggtgccggagactcattcataggcgcactcttgcagaaaatggtcgaggaccaatccataatcacagaggaagcaaagttgaaggaagtacttagatttgcttgtgcatgtggagccattacaaccaccaagaaaggagcaatcccagctctgcccacagaatctgaggccctaaagcttcttaatgctgcataaacaaggaggaccttccattgtcctagttgtattttccttttaagtttcctttttactttctctgtggtttaagtttcccttttcctttatgtagttttagttttggtaggaatttttgcttggggtccaaattaagttgggcttcctatttcttagatttttgtgggtttttccttctcttttatgcttgcaacgatgaagacgcgtggttaatggttgtttttaataatagattcatcttgtttgtcaaaaaaaaaaaaaa

SEQ ID NO: 1826 - DNA, 1240 bp, Chenopodium quinoa
aactttctctctctactttcttcctctctcaacaatggcagaaaccaacaacaacaatggtggactctcaatcaatggcgccgattccaaaggcttagtcgtgagtttcggagagatgttgatcgactttgttccgacagtttccggcgtttctctcgccgaagcgccgggattccttaaagctcccggcggcgctccggcgaacgttgcgatcgccgttgcgaggctcggcggtaaagccgccttcgtcggaaaactcggcgatgatgagtttggtctcatgctcgccggaattctcaagaaaaacggtgtttccggcgacggtttaacgttcgatcaaggtgcgagaactgctctcgctttcgttacgctgaaagctgatggtgaaagagaattcatgttttaccggaatccgagtgctgatatgcttcttactcccgatgagctcaacctcgaccttattcgatcggctaaggtgtttcattatggttctattagtttgatcgtcgagccatgtaggtcagcccatttgaaagcaatggaggaagccaaaaaggctggagctttgctctcatatgatcccaaccttaggctacctttgtggccttccgccaaggaggctcgtgagcagatcttgagcatctgggacaaggccgaggtgatcaagatcagtgacaacgagcttgagttcctcacagaaagcaacaccgtcgatgatgctactgcgatgtcattgtggcactctaatttgaagcttctcttggtcactcttggtgaccatggttgcagatactacaccaagaacttcaagggaagtgtggaggcattcaaggtgaatgcagttgacactaccggtgctggtgactcctttgttggtgccttgttaggaaaaatcgtcgatgatcactctattatcgaggatgaaccacgattgaaggaagctttgaaattcgccaacgcatgtggagccattacaaccaccaagaagggtgcaatcccagctctaccaacagaagccgaagcctttgagctcatcaagaaggcttctcagtgatttcatactgttaattcatttgtgtgttagatctcttggtttgcttggtattttcgggattttgattagtgaattgaagagaattaggaagttgtgggggaaaattcaactctaaaattttctccactgtgtaaggataaacaagtcttttatatgagtattgataaataaatattttgaattatg

SEQ ID NO: 1827 - DNA, 1134 bp, Brassica rapa
ctaatctctccctctgttctctaattctctaacacactcatcccacaaatggctacatccaccggcgagaaaagcttgatcgtttcattcggcgagatgctcatcgacttcgttcccaccgtctccggcgtatccctcgctgaagctcctggcttcatcaaggcccccggtggcgcacctgccaacgtcgccatcgccgtttcccgtctcggtggccgagctgcttttgtcggaaagctaggtgacgacgagtttggccacatgctcgccggaatcttgaaacaaaacggcgtatctgccgaaggtatcaacttcgatactggagctaggacggcgcttgcgttcgtgacgttaagatccgatggtgaacgtgagttcatgttctaccggaaccctagcgccgacatgctcctccgtcctgatgaactcaatctcgatctcatcaaatctgctaaggtgttccactatggatcgataagcctcattgttgagccatgtagatctgctcacctgaaagccatggaggtggctaaagaagcaggtgcgttgctctcgtacgacccaaacctgaggctgccattgtggccctcggaggaggaggctaagaaacagatccttagcatctgggacaaagctgaagtgatcaaagtcagcgacgaagagcttatgttcttgactgggtctgataatgttgatgatgagactgctttgtctctgtggcatgataacttgaaacttctcttggtcactttgggtgaaaagggttgtaactattacaccaagagcttccgtggatctgttgatcctttccatgtgaacgcagttgatacaactggtgctggtgattcatatgttggtgccttgctttgcaacattgttgatgaccgtgctgttctagaggacgaagctcgtctcagagaagtgcttaggtttgcgaatgcatgtggagccattacgactacgaagaaaggagcaattccagctcttcctacagaatctgaggttcagagtctcctcaatggaaactgatctaggagtctaggacatgtctggtcttacgatttcacgtttttttaatttccttttgttttcgttcagtgttcagagaacagtttgattctgttaaatgtgttt

SEQ ID NO: 1828 - DNA, 1172 bp, Euphorbia peplus
caaccttcttttctctctctagaaatctccgtcctttctctctctacaaatgacgtcagccgtcgtcaccaatggcaactcacactcttcttctctcatcgtcagcttcggcgagatgctcatcgacttcgtccccaccgtatccggcgtctccctcgccgaagctcccggtttcttgaaagctcccggcggtgctccggcgaacgtggcgatcgcggtggcgagactcggcggaaatgccgccttcgtcgggaaacttggggatgatgagtttggtcacatgctcgccgggatcttgaaagaaaacggcgtcaacggtaacggaattaactttgacaaaggtgcaagaactgcgttggcgtttgttactctacgcgctgatggggagcgtgagtttatgttctaccggaatcctagcgccgacatgttgttgacgccggaggaacttaatcttgaagttattagatctgctaaagtgttccattatggatccataagtttgatagtggagccttgcagatcggcacatctgaaggcaatggaagtggcaaaagatgcaggagctttgctgtcatatgatccgaatctaaggttgccattgtggccatcggcagagtatgcccgtgaacagattatgagcatctgggataaggctgaggtgatcaaagttagtgataatgagcttgaatttctcacaggtagcgacaaaattagcgatgaagatgcgttgtcgctatggcatccaaatttgaaactgatgttggttacccttggtgagaagggttgtagatactacaccaagaatttccgtggacaagtggatggtttccatgtcaaaactgtggatacaacaggtgctggtgattcttttgtcggatccttattatgcaagattgtagatgatcattcagtacttgatgatgagccgagattgagagaaattcttagatttgcaaatgcgtgtggagccattacaaccaccaaaaagggagctattcctgcccttcctactgtctctgatgtcgttggcttaatcgaagcttcaaaatagacacatttagtttttaccctctttttttctccttcacattttagtgttttcagtcccaaatttctcttctcttgtttctatcataaatgtgttatgatgcaagacttttgccgtaaggtct

SEQ ID NO: 1829 - DNA, 1615 bp, Brassica juncea
ccacccgttacaactctttgttcgtcctctatataaacccttctctccttcccatcattttatatcattctcttctctaatttttatctctctgatttgatccaacgatccacagatctcatttcctaatggcatccaacggcgagaaaccactgatcgtcagcttcggcgagatgctcatcgacttcgtccccaccgaatccggcgtctcgctcgccgaagctccaggtttcctcaaagctcccggcggcgctccggctaacgtcgccatcgccgtctctcgtctcggcggacgatccgccttcgtcgggaagctcggcgacgacgagttcggccacatgctggccgggatcctgaggaaaaacggcgtcgccgatcagggcatcaacttcgataccggagctagaaccgccttggcgttcgtgacgttgaaggccgacggagatcgggagtttatgttttaccggaatcctagcgccgatatgctcctccgtcccgatgagctcgacctcgagctcatcagatccgctaaagtgtttcactatggatcaataagcttaatagtggagccatgtaggtcggctcacttgaaagccatggaagtggcgaaagaagcgggagctcttctttcctacgacccaaacctcagggagcctctgtggccatcgaaggaagaagccaagacacagatcatgagcatctgggacaaggctgagatcatcaaggttagcgacgttgagcttgagtttctaactggaagcaacaagatcgatgatgagaccgcaatgtccttgtggcatcccaacttgaagctcttgcttgtcactctcggtgaaaagggttgccggtattacgccaagaacttccgtggatccgttgaccctttccatgtgaacgcggtggatacaaccggagctggagattcctttgtaggtgccctcctaaacaagattgccgatgatcactccattctcgaggacgaagagagattgcgaaaggtgctaagattcgcaaacgcttgtggagcaatcaccacaaccaaaaaaggagccattccagctcttccttcagaagctgaagttctcagctttcttgaagggaagtaaaaaacaaacacaactctcaacctttctccaagttaatctgttttcgcttatgtattgttttcttatggttaaaatcagaggagagaaaccagttgggcactacgctctgtttttgtttctcttcctcagatgtaacgatttaaatagacttgtgtttcatttcaaggcatcatttgctaataaagagagaagtgtctttcaatattctgaagtacatacacaatacctatatcactggtttgaatcagatcacagagaaagcaaaggcaaaaacaataatagattggcgtttgtaggtatatatgccaatcatgtgctgcatataagctttactagttccttttatagtttaagcctaggtcagggacaaggaagtgctcttcatcttcatcatcatcataacggatctcaagcctcggcttcttgttggaaacatttgagttcatgggtctgttgtaggaatgaacatgagccaaatgtgaaaccgaaagctcgggaacttcagctgc

SEQ ID NO: 1830 - DNA, 1095 bp, Brassica oleracea
atccaacgatccacagatctcgtttccacatggcatccaacggagacaaaccactgatcgtcagcttcggcgagatgctcatcgacttcgtccccaccgagtccggcgtctccctcgccgaagctccgggcttcctcaaagcccccggcggcgctccggctaacgtcgccatcgccgtctctcgtctcggcggacgatccgccttcgtcggaaaactcggcgacgacgagttcggtcacatgttggctgggatcctgaggaaaaacggcgtcgctgatcaggggatcaacttcgacactggagccagaaccgccttggcgttcgtgacgttgaaggctgacggagatcgggagtttatgttttaccggaatcctagcgccgatatgcttctccgtcccgatgaactcaacctcgagctcatcagatcggctaaggtgtttcactacggatcaataagcttaatagtggagccatgtaggtcagctcacttgaaggccatggaagttgcgaaagaagcaggagctcttctttcctacgacccaaacctcagggaacctctgtggccatcaaaggaagaagccaagacacagatcatgagcatctgggacaaggctgagatcatcaaggtgagcgacgtcgagctcgagtttctcactggaagcaacaagatcgacgatgaaaccgcaatgtccttgtggcaccccaacttgaagctcttgcttgtcactctcggtgaaaagggttgtcggtattacgccaagaatttccgtggatccgttgaccctttccatgtgaacgcggtggatacaacaggagctggagattcctttgttggtgctctcctaaacaagattgccgatgaccactccatcctcgaggacgaagagagattgagaaaggtgctaagattcgcaaacgcttgtggagcaataaccacgaccaaaaaaggagccattccagctcttccttcagatgctgaagttctcagctttcttgaagggaagtagaaaacaaaaaacaactctcaagctttctccaagtaaatctgtttttgcttatgtaatcttgttgtaagagaaaccaattaggcaggca

SEQ ID NO: 1831 - DNA, 2462 bp, Brassica rapa
tcgtcctctatataaaccattctctcctcttcatttcatttcatttcatttcccttctataattttttaatatctccgatttgatccaacgatccacagatctcgtttccaaatggcatccaacggcgagaaaccactgatcgtcagcttcggcgagatgctcatcgacttcgtccccaccgagtccggcgtctccctcgccgaagctccgggcttcctcaaagcccccggcggcgctccggctaacgtcgccatcgccgtttctcgtctcggtggacgatccgccttcgtcggaaaactcggcgacgacgagttcggtcacatgttggctgggatcctgaggaaaaacggcgtcgctgatcaggggatcaacttcgataccggagctagaaccgccttggcgttcgtgacgttgaaggccgacggagatcgggagtttatgttttaccggaatcctagcgccgatatgttgctccgtcccgatgagctcaacctcgagctcatcagatcggctaaagtgtttcactacggatcaattagcttaatagtggagccatgtaggtcggctcacttgaaggccatggaagttgcgaaagaagcaggagctcttctttcctacgacccaaacctcagggagcctctgtggccatcaaaggaagaagccaagacacagatcatgagcatctgggacaaggctgagatcatcaaggtgagcgacgtcgagctcgagtttctcactggaagcaacaagatcgacgatgaaaccgcaatgtccttgtggcaccccaacttgaagctcttgcttgtcactctcggtgaaaagggttgtcggtattacgccaagaatttccgtggatccgttgaccctttccatgtgaacgcggtggatactaccggagctggagattcctttgttggtgctctcctaaacaagattgccgatgaccactccatcctcgaggacgaagagagattgagaaaggtgctaagattcgcaaacgcttgtggagcaataaccacgaccaaaaaaggagccattccagctcttccttcagatgctgaagttctcagctttcttgaaggcaagtaggaaaaaaaaaaaacaactctcaagctttcttatgcaatcttgttgtaagagaaaccaattaggcacgctatgttttgtctctcttcctcaaatgtaatgatttaaggaactatgcttaaaattcagcatcatttgctaataaaagataatattttttttgaactgcatacaaaatacttataatactggtttgaatcatgtgctgcatataagttttctagttccttttatagtttaagcctaggtcagggacaaggaagtgctcttcatcatcatcataacggatctcaagcctcggcttcttgttggaaacattggagttcatgggtctattgtaggaatgaacatgagctagatgtgaaaccgaaagctcgggaacttcagctgctggtagagcttcttgatcaggctggtcccctaagaaacccatctctgcaagccagtccagctctccaagatcaagctgctctttctgccaaaaccacaacaaatgtgaaaataagctattacaacaaaccaacacatttagtactcatagatttggtaaaccactttctcaccttgttactgcactcaagatctgagtagcggaagaactcatctccagcccatggaggagatggagcggcaggctgttgagttcgaggtttagagagagtctgctggttaggtgggtcgaaatggttcatcttcacttctttactgcaactagcagagctgagagcgactcggattccagtagccaagaatctctggtgattagcagagcgagtattaggcgcatgcgtcccctcgtcacagtctctgcagagaagagctctatcctcaacacagaatatgaaagctgccttttcctgtaagtcaacaaagatagagcacaagaaagagattaaccttttaacatgtgtttcttgaaatctaaaatcagtttactaaagttaaaatctaatcactcgatctttgttaacgaatagatacaaaagctaagaaacttctcaataatactcttgaagaataataaaacagaagaggagacgtgtcttacaaggcagatgtcgcatggagggaacttggtggatatagagtcaagaaaaaggcgttggtgtttgctagctagcttattggctgcgtgaacctcaacgtcgcatttagcgcatagagcagcctcatcggcacaacatatgagtgtagccggagctttctcacacacatcacactgtatcttcatccttctctcttcactttcacagaaccaccaaatggagacaaaaacttgagatcaaagttaagaaaagaaacaatattgtttagtgttcaagttgagtgattggtggaagagaagaagataagaggagaggttttatgattctgc

SEQ ID NO: 1832 - DNA, 1053 bp, Brassica napus
gatcatttcccttctataattttttaatatctccgatttgatccaacgatccacagatctcgtttccaaatggcatccaacggcgagaaaccactgatcgtcagcttcggcgagatgctcatcgacttcgtccccaccgagtccggcgtctccctcgccgaagctccgggcttcctcaaagcccccggcggcgctccggctaacgtcgccatcgccgtctcgcgtctcggcggacgatccgccttcgtcggaaaactcggcgacgacgagttcggtcacatgttggctgggatcctgaggaaaaacggcgtcgctgatcaggggatcaacttcgataccggagctagaaccgccttggcgtttgtgacgttgaaggctgacggagatcgggagttcatgttttaccggaatcctagcgccgacatgttgctccgtcccgatgaactcaacctcgagctcatcagatcggctaaagtgtttcactacggatcaattagcttaatagtggagccatgtaggtcggctcacttgaaggccatggaagttgcgaaagaagcaggagctcttctttcctacgacccaaacctcagggaacctctgtggccatcaaaggaagaagccaagacacagatcatgagcatctgggacaaggctgagatcatcaaggtgagcgacgtcgagctcgagtttctcactggaagtaacaagatcgacgatgaaaccgcaatgtccttgtggcaccccaacttgaagctcttgcttgtcactctcggtgaaaagggttgtcggtattacgccaagaatttccgtggatccgttgaccctttccatgtgaacgcggtggatacaaccggagctggagattcctttgttggtgctctcctaaacaagattgccgatgaccactccatcctcgaggacgaagagagattgagaaaggtgctaagattcgcaaacgcttgtggagcaataaccacgaccaaaaaaggagccattccagctcttccttcagatgctgaagttctcagctttcttgaaggcaagtaaaaaaaa

SEQ ID NO: 1833 - DNA, 1312 bp, Brassica napus
tttcacttctccgttttgatcttaactctccacagatctcattctcttctccaatggctgcatccaacagcgagaaaggactcatcgtcagcttcggcgagatgctcatcgacttcgtccccaccgaatccggcgtctcgctcgccgaagctccaggcttcctcaaagctcccggcggcgcccccgccaacgtcgccatcgccgtttcgcgtctcggcggacgatccgccttcgtcgggaagctcggcgacgacgagttcggacacatgctcgctgggatcctgaaggagaacggcgtcgctgatcaggggattaacttcgacacgggagcaagaacggccttagcgttcgtgacgttgcgtgctgatggagatcgggagttcatgttttaccggaaccccagcgccgacatgctcctccgtcccgatgaactcgacctcgacctcatcagatccgctaaagtgtttcactatggatcaataagcttaatagtggagccatgtaggtcagctcacttgaaggccatggaagtggcgaaagaagccggagccattctttcctatgacccaaacctcagggagcctctgtggccatcaaacgaagaagccaagacacagatcatgagcatctgggacaaggctgagatcatcaaggtcagcgacgtcgagctcgagtttctgactggaagcaacaagatcgatgatgaaaccgcaatgtccttgtggcatcccaacttgaagcttttgcttgtcactcttggtgaaaagggatgccggtattacgccaagacattccgtggatccgttgaccctttccatgtgaacgccgtggatacaaccggagctggtgattcctttgttggtgctctcctaaacaagattgccgaggatcaatccattctcgaggacgaagagagattgagaaaggtgctaagattcgcaaacgcttgtggagcaatcaccacgaccaagaaaggagctattccagctcttcccaccgatgctgaagttctcagctttcttgaagggaagtaaaaaaacaaaaacaactctcaagctttctccatgtgatgtgtgttcgcttatgtattattgttttctctctctttttttgtttaaagacatatatgtttcaatttaatgcatcccttgctaataataagaacagtattttcaaagtttaagactaacatgccaacacatatattactggtttgaatcagatcacagagaaagtaaggcaaaggcaaaagatgagtgtgtgtaggtacatatggcgaagcaaatgctataaatatatatctagtttcatc

SEQ ID NO: 1834 - DNA, 1462 bp, Panax ginseng
ggaaaaggtgctgaagtggggaattaccatctttgattagtttgaactatcttcactttcgtacttagtccctattggtagtttcctagactccctttagctaagcagtggtatcaacgcagagtacatggggatatacttacaataactaattattctctctctatttatatatatctatacatatatacatattttaatatcatcatatggccattaatggagtctcacctaccggaggaatggtcgtcagcttcggcgagatgctgatcgacttcgtccccactgtctccggcgtgtctctggctgatgcaccaggtttcctcaaggcgcccggcggagctccggcgaacgtggcgatcgccgtttcgaggctcggcggaaaggcggcgttcgtcggaaaactcggcgacgacgagttcgggcagatgctcgccagaattctcaaggaaaatggcgtctccgccgacggggtcaacttcgacaagggcgccaggacggccttggcgttcgtgacgctacgcgccgacggagagcgcgagtttatgttttacaggaatcctagcgcagacatgttactgacgccggacgagttgaatctcgagcttattagatctgctaaagttttccattatggatccataagtttgatcgtagagccgtgcagatcatcacatttgaaggcaatggaggaagcaaaggaagcgggtgccctgctctcctacgacccaaacctccggctaccactgtggccatcagctgaggaggcacgcgagaagatcttgagcatttgggacaaggctgatgtgatcaaggtcagtgacaatgagctggagttcctgactggtaaagaggtaagtgacgaggcagcaatgtccctgtggcaccctaatttgaagcttcttctggtgacccttggagagaaaggctgcagttattacaccaagaatttccatggatatgtccctgggtttcatgtcaagacagtggatacaactggtgccggagactcattcataggcgcactcttgcataaaatggtcgaggaccaatccataatcacagaggaagcaaagttgaaggaagtacttagatttgcttgtgcatgtggagccattacaaccaccaagaaaggagcaatcccagctctgcccacagaatctgaggccctaaagcttcttaatgcggcataaacaaggaggaccttccattgtcatagttgtattttccttttaagtttcctttttcactttctctgtggtttaagtttcccttttcctttatgtagttttagttttggtaggaatttttgcttgggatccaaattaagttgggcttcctatttcttagatttttgtgggtgttttcttctcttttatgcttgcaacgatgaagacgcttggttaatggttgtttttaaataataaattcatcttgtttgtcaaaaaaaaaaaaaaataaa

SEQ ID NO: 1835 - DNA, 1327 bp, Panax ginseng
aattattctctctctatatatatatctatacatatatacatattttctctctctaaaagtaatatcatcatatggccattaatggagtctcacctaccggaggattggtcgtcagcttcggcgagatgctgatcgacttcgtccccactgtctccggcgtgtctctggctgatgcgccaggtttcctcaaggcgcccggcggagctccggcgaacgtggcgatcgccgtttcgaggctcggcggaaaggcggcgttcgtcggaaaactcggcgacgacgagttcgggcagatgctcgccagaattctcaaggaaaatggcgtctccgccgacggggttaacttcgacaagggcgccaggacggccttggcgttcgtgacgctacgcgccgacggagagcgtgagtttatgttttaccggaatcctagcgccgacatgttactgacgccggacgagttgaatctcgagcttattagatctgctaaagttttccattatggatccataagtttgatcgtagagccgtgcagatcatcacatttgaaggcaatggaggaagcaaaggaagcgggtgccctgctctcctacgacccaaacctccggctaccactgtggccatcagctgaggaggcacgcgagaagatcttgagcatttgggacaaggctgatgtgatcaaggtcagtgacaatgagctggagttcctcactggtaaagaggtaagtgacgaggcagcaatgtccctgtggcaccctaatttgaagcttcttctggtgacccttggagagaaaggctgcagttattacaccaagaatttccatggatatgtccctgggtttcatgtcaagacagtggatacaactggtgccggagactcattcataggcgcactcttgcataaaatggtcgaggaccaatccataatcacagaggaagcaaagttgaaggaagtacttagatttgcttgtgcatgtggagccattacaaccatcaagaaaggagcaatcccagctctgcccacagaatctgaggccctaaagcttcttaatgcggcataaacaaggaggaccttccattgtcgtagttgtattttccttttaagtttcctttttcactttctctgtggtttaagtttcccttttcctttatgtagttttagttttggtaggaatttttgcttgggatccaaattaagttgggcttcctatttcttagatttttgtgggtgttttcttctcttttatgcttgcaacgatgaagacgcttggttaatggttgtttttaataataaattcatcttgtttgtaaaaaaaaaaaaaaaaaaaaaaaa

SEQ ID NO: 1836 - DNA, 1192 bp, Orobanche aegyptiaca
aaaatacgtatataataccttttattttatttcattattatattattactctgcatcagacatggcggtgagcaacggagattccggcaagggcctgatcgtgagtttcggcgagatgttgatcgacttcgtgccgacggtctccggcgtgtcgctggcggaggccccggggttcctgaaggctcccggaggcgctccggccaacgttgccatagccgtggcgaggctcggcgggaacgctgcgttcgtcggaaagctcggggacgacgagttcggacacatgctcgccgggatcctgaaggagaacggcgtatccgccgacggggttaccttcgacaagggagcgcgtacggcgctggcgttcgtgacgctacgcgccgacggcgagcgtgagtttatgttctacaggaatccaagcgctgatatgctcctcacgcccgatgagttggatatcggactcattagatctgcgaaggttttccactacggatcgataagcttgatcgtggagccatgccgatcagcacatctcaaggcaatggaggaagccaagtctgcaggggcattgctgtcttacgacccgaacctccgattacccctttggccgtctgccgaatacgctaaagagcagataatgagcatatggaatcaagccgaccttattaaggtcagcgacgtcgagctcgagttccttacgggcagcgacaagattgatgatgaatctgctttgtctctatggcacccaaacttacagttactcttagtcactcttggtgagaaaggctgtagatattacaccaagaaattccgtggatcaattgctgggtatcctgtgaaaacagtagacacaactggagctggtgattcctttgtggggtccctccttgggaagattgttgatgaccattccataatccacgatgaggtgaggttgaaggaagtgttgaaatatgcatgtgcatgtggagcaatcaccaccactaaaaaaggtgcaattccagctcttccaaatcactctgaggtccttactattctcaatggaccatcaaaataggaaagagatcaatcatcagagtcccttttgttcatgttttcttaatagcacttagttttttttttttttagtttttaacctaatttgcaatttctttgcattgtaattgcaattcatattctcaaatttgggatgtca

SEQ ID NO: 1837 - DNA, 1225 bp, Raphanus sativus
ggatatttactctcttctctatcagttctccgatttgatccaacgatccacagatctcgtttccttcttccaatggctgcatccaacggcgacaaaggactcatcgtcagcttcggcgagatgctcatcgacttcgtcccgaccgagtccggcgtctcgctcgccgaagctccaggcttcctcaaagctcccggcggcgctcccgccaacgtcgccatcgccgtcacgcgtctcggcggacgatccgccttcgtcggaaaactcggcgacgacgagttcgggcacatgctcgcggggatcctgagggagaacggcgtcgccgatcgggggatcaacttcgacacgggagcaaggacggctctggcgttcgtgacgctgcgtgccgacggagatagggagtttatgttttaccggaaccccagcgccgatatgctcctccgtcccgacgaactcgaccttgacctcatcagatctgctaaagtgtttcactatggatcaataagcttaatagtggagccatgtaggtcagctcacttgaaggccatggaagtggcgaaagaagcaggagctctcctctcctacgacccaaacctcagggagcctctgtggccatcaaaggaggaagccaaaacacagatcatgagcatctgggacaaggctgagatcatcaaggtcagcgacgtcgagctcgagtttctaactggaagcgacaagatcgatgatgaaaccgcaatgtccttgtggcatcccaacttgaagctcttgcttgtcactctcggtgaaaagggctgccggtattacgccaagactttccgtggatcggttgaccctttccatgtgaacgccgtggatacaaccggagctggagattcgtttgttggtgctctcctaaaccagattgctgaggatcaatctattctcgaggacgaagagagattgagaaaggtgctaagattcgcaaacgcttgtggagcaatcaccacgaccaaaaaaggagccattccagctcttcccaccgatgctgaagttctcacctttcttgaagggaagtaaacacacaaaaacatctctcaagcttactcccgtgtaatctgtgttgttcgcttatgtattcttgttttctgatgtttggtttaaatcaattggctctgtttttgtttcttatcttcacatgtaacgatttaaaaaaaagacatgtttcaattcaaggcatcgcttgctaata

SEQ ID NO: 1838 - DNA, 1205 bp, Helianthus annuus
tcatctctttcctctaaaaacctgcaactttttttcttctctcaagctcatcaatggcggccaccaatggagtcaccgacaaaaaactgatcgtcagcttcggcgagatgctaatcgacttcgtccccaccgtctccggcgtctcactagcagaagcaccgggattcctgaaagcaccaagcggcgctcgggcaaaagtcgcgatcgccgtctcacggctcggcggcgacgcggcgttcgtcggaagttaggcgacgatgagttcggtcacatgctcgccgggatcttgaaggagaacggtgtcgccggtgagggaatttgctttgataaaggtgcgagaactgcgttggcgtttgttacgttgaaatcggacggtgatcgtgagtttatgttttaccggaaccctagcgccgatatgttgttgacgccggaggagctgaaccttgagattattagatctgcaaaagttttccattacggatcaataagtttgatcgtggagccatgcagatcagcacatctgaaagcaatggaagttgcaaaggaagcaggggcacttctgtcatatgacccaaatctccggctgccattgtggccatcagctgaggaggcacgcgagcaaatcatgagcatatgggaaaaggctgaggtgatcaaagtgagtgataacgagcttgaatttcttaccggaagtgacaagattgatgatgagtcagcaatgtctttgtggcacccaaatttgaagcttctgttggttactcttggtgacaaaggttgcaattactacaccaagcattttcatggtaccgtgggtgcattcccagtgaaagcagtggacacaacaggtgctggtgactcttttgttggtgctctcctcacaaagatcgttgatgaccattccgtgcttgaggatgaagcaaggttgaaagaaatactgagatactcgtgtgcctgtggagcgatcactaccaccaaaaagggtgcgatccctgcccttcctactgtgccagagctcgacgcctttttgaaggctcatccttagatagtattttcgtcgtctgttttgtttttgttttcttgatcgaataataaaatttctttgaaatgattttgtattatcatcaatcaatgtttaaagaaacagaaatcgatttgtaaaaggttgaagaatttgagtgattaagtgattcaaccctagtttactt

SEQ ID NO: 1839 - DNA, 1441 bp, Amaranthus tuberculatus
aaaacccccaataaatcatcactttctctatataattcccttcaatcaatcttttaatctatctatctctctacttttctctttctaaattctctgaagcttttttctcgttcaacagtaatggcggaaaccaatggactttcaaatggcgccgacgttaagggcaaggtcatctcattcggtgagatgcttatagactttgtgccaacagtttccggcgtatcactcgctgaagctccgggattccttaaagctcccggcggtgctcctgccaacgttgcgatcgctgttgcaaggctgggaggaaacgcttctttcgttggaaaacttggcgatgatgaatttggtcacatgcttgccggaattcttaaaaaatggagtttcaggggatggtttaactttcgataaaggtgctagaactgctttggctttcgttaccttgagatctgatggtgaacgtgaatttatgttctaccggaaccctagcgctgacatgcttctcactcccgatgagctcaatcttgaactcatccgatcggcaaaggtgttccactatggctcaattagcttgattgtggagccatgcagatcggcacacttgaaagcaatggaggaggccaaaaaggctggagctctgctttcatatgatcctaaccttcgattgcctttgtggccatccgccgaggaggctcgtgagcagattttgagcatttgggacaaagcagaggttatcaaggtcagcgacaatgagttggaattcctcactggaagcagcactattgatgatgctaccgccatgtctttgtggcatgataatttgaagcttctcttggtcactcttggtgaccagggttgtagatattacaccaagaacttcaagggaagtgtggaagggttcaaggtagaaacaatagacacaactggtgctggagactcttttgttggtgcattgctaggcaagatcgtggatgaccactctattattgaggatgaagcaaggttgaaggaagtattgacattcgccaatgcctgcggggccatcacaacaaccaaaaagggagcaatccctgcactccctaccgagactgaagtcctggagcttattaagaagagttcctcttagtcattttcattaccgcattttgtcctatattggtttcttggcttgttggcttcctttgttttgttgggttttcattgattttccaaaatttgagtagtcatatgaggagagttaggagatgaattgaacctgtgaaatgtggtatccttatctaaattttcatgttattaaataaatattttatttgcgtctctttgccaatcaaagaggcaattatataaagtatattgtctattgtttgtagtttagctatgcatattggattagttttatattccgagttatttgatgattactgtatcattacactgatcgtat

SEQ ID NO: 1840 - DNA, 1341 bp, Brassica rapa
atatccaaaacataatctctcccttagttccataacataaacactctccgaccaccaaatgtctacatccaacggcgagaaaagcttgatcgtgagcttcggtgagatgctcatcgactttgtccccactgtctccggcgtatcactctctgaggctcctggcttcatcaaggctcccggtggtgcacctgccaacgttgctattgctgtcgctcgtctcggtggccgtgctgcttttgtcggaaagctcggtgacgatgagtttggtcacatgctcgccggaatcttgaaacaaaacggtgtctctgcagaaggaatcaactttgatactggagctaggacggcgcttgcgttcgtgacgcttagatctgatggagaacgtgagttcatgttttaccggaaccctagcgccgacatgctcctccgtcccgatgagcttaacctcgatctcatcagatctgctaaggtgtttcactatggatcaattagtctcatcgtggagccatgtagatctgctcatctgaaagccatggaggtggctaaagaagctggtgcattgctctcttatgacccaaacttgaggctacctttgtggccttccaaggaggaggctaagaagcagattcttagcatctgggacaaagctgaagtgatcaaagtcagcgatgaagagcttatgttcttgactggatctgataacgttgatgatgagactgctctgtctctgtggcatgataacttgaaacttctcttggtcactttgggtgaaaagggttgtaattattacaccaagagcttccgtggatctgttgatcctttccatgtggacgctgtggacacaactggtgctggtgattcatatgttggtgccttgctttgcaacattgttgatgaccgctctgttcttgaggatgaagctcgtcttagagaagtgctcaggtttgcaaatgcatgtggagccattacaacaaccaagaaaggagcaattccagctcttcccacagtgtctgaagttgaaactctcctaaatgcaaactgatctacaacaagtctggtttttaagatttcacattttactctcttttttgtttgctttgtgttttggttctgtgtggttcatagaactgtttgattatgttaccttatgaataaaaactcgttaccaagttttttgaaagcttcaaagaacaattgcttgaggataacattcagaaacttgcaagtccaaagatctccaaatgtgtttgcattcttcccacctagaactcatcctctccagaaatgattcagcccacaattccttgctaccttccatactcagatcatatggcactgagaaac

SEQ ID NO: 1841 - DNA, 1333 bp, Panax ginseng
ctatatatctatatatacttacaataaccaattattctctctctatatatatatctatacatatagacatattttctctctaatagtaatatcatcatatggccattaatggagtctcacctaccggaggattggtcgtcagcttcggcgagatgctgatcgacttcgtccccactgtctccggcgtgtctctggctgatgcgccaggtttcctcaaggcacccggcggagctccggcgaacgtggcgatcgccgtttcgaggctcggtggaaaggcggcgttcgtcggaaaactcggcgacgacgagttcgggcagatgctcgccagaattctcaagcaaaatggcgtctccgccgacggggtcaacttcgacaagggcgccaggacagccttggcgttcgtgacgctacgcgccgacggagagcgtgagtttatgttttaccggaatcctagcgccgacatgttactgacgccggacgagttgaatctcgaccttattagatctgctaaagttttccattatggatccataagtttgatcgtagagccgtgcagatcatcacatttgaaggcaatggaggaagcaaaggaagcgggtgccctgctctcctacgacccaaacctccggctaccactgtggccatcagctgaggaggcacgcgagaagatcttgagcatttgggacaaggctgatgtgatcaaggtcagtgacaatgagctggagttcctcactggtaaagaggtaagtgacgaggcagcaatgtccctgtggcaccctaatttgaagcttcttctggtgacccttggagagaaaggctgcagttattacaccaagaatttccatggatctgtccctgggtttcatgtcaagacagtggatacaactggtgccggagactcattcataggcgcactcttgcataaaatggtcgaggaccaatccataatcacagaggaagcaaagttgaaggaagtacttagatttgcttgtgcatgtggagccattacaaccaccaagaaaggagcaatcccagctctgcccacagaatctgaggccctaaaccttcttaatgctgcataaacaaggaggacccttccattgtcctagttgtattttccttttaagtttcctttttcaccttctctgtggtttaagtttcccttttcctttatgtagttttagttttggtaggcatttttgcttgggatccaaattaagttgggcttcctatttcttagatttttgtgggttttttcttctcttttatatgcttgcaacgatgaagacgcttggttaatggttgtttttaataataaattcatcttgtttgt

SEQ ID NO: 1842 - DNA, 1381 bp, Tropaeolum majus
tggtttcgattcaccaaccctcttttataaataaccttcttcctcttctttatttcatacttcaattattattattattattattttaatttttattattttcagtactattcataaattctgtgttcttcactccaaaaaaagaaaagaaaaacatcttttccaatggcatcggacggtgaaaagagcctgatcgtgagtttcggcgagatgctgatcgactttgtccctacagtctccggcgtttccttagccgacgctccaggctttctcaaagctcctggtggtgctcccgccaacgtcgcaatcgctatctctcggatcggcggtcgctccgctttcatagggaagctaggtaaggatgagttcggtctcatgctggctgggatcctcaaggaaaacggcgttgctactgagggaataaacttcgatacaggtgctaggaccgcacttgccttcgtgacgttaagggaggacggagaacgtgagttcatgttttacaggaatccgagcgctgatatgctgctcacacctgaggagcttaaccttgatcttatcagatctgccaaagtattccattacggatcaataagcttgatcgtggagccatgcagatctgcgcacttaaaggcaatggaagttgcaaaagaggctggagctctgctctcttacgaccctaacctcagattgcctttgtggccatcagctgaggaggctcgtaagcagatcatgagcatctgggatcaggctgaggtgatcaaggtcagtgataatgaattggagtttctcacagggagtgacaaaattgatgatgaatcagctatgtcgttatggcactctaacttgaagctccttttggtcaccctcggtgaaaagggttgcagatattacaccaagaatttccatggagcggtcgagggattccatgtgaaggcagtggatactactggcgctggtgattcatttgttggtgccttactatgcaagcttgttgatgaccattccatcctcgaggatgaagaaaggttgagagaaatactgaaattcgcaaatgcatgtggagccatcacaactaccaaaaaaggagcgatcccggcgcttcctacagcggctgaagctcttactctaatcgacaggcaataagaaagttgtttcaatacttttttatttttctcgtttctttttgattttctagtttcttgtaagtcaagcaaagaggatgggataacactctctttttatcttatttttttttactttagtgttggaagactttgcacatggatccatttagtttatacaataaccctgggtttttagtatttattgaaacttgttttgtacatcgttttatttttattaaatttgtgtgtcgatgcat

SEQ ID NO: 1843 - DNA, 1251 bp, Silene vulgaris
cattcaacaatggcggaacaaatcaatggcgaacaaaaaaccacaggattagtcgtctccttcggcgaaatgctaatcgactttgttccgacagagtccggcgtatctctcgctgaagcaccgggatttctcaaggctccaggaggtgcgccggccaacgtcgcgatcgcggtggctaggatgaacggaaacgctgcgttcgctggaaaactcggtgctgatgagtttgggcgtatgttagccgcgatattgaaacaaaacggtgtctctgacgaagggatttgctttgatgaaggggctagaactgcgcttgcgttcgttacgttgagatctgacggcgaacgcgagttcatgttttatcggaatccgagtgctgatatgttgcttcgtcctgatgaacttaatctcgaactcattcgtcaggccaaagtatttcattatgggtcaattagtttgatcgttgagccatgtcgatcagctcatctgaaagctatggaggaggccaaggcagctggggctttgttatcctatgatcctaaccttaggttgcctctgtggccatctgccgaggaggcccgtaaacaaatcttgagcatttgggacaaggctgaggtgatcaaagtgagcgacaacgagctcgaattcctaaccggaaacagtgacattggtgatgatactgcaatgtcgttgtggcacccaaatttgaagcttatgttggtcactcttggtgatcatggttgtaggtactacaccaagacctttaagggaagtgtggaagctttcaaagttaaggccgttgacactacaggtgctggggactcttttgttggtgccctactgagcaagattgttgatgaccatgcaattattgaggatgagccacggttgagggaggtactgaaattcgccaatgcttgtggagccatcacaactaccaagaagggagcaatccccgctcttccaacagaaaccgaggctttggagttcattaaaaactcgtcttagaacttctttgtatcatttcaccccctttgatgtcttgggtttttcttatcgaggtcgattttattttccgtgatttggttagtgaattggataggactcatagagggatcaagttgaatcttatagtggaactcccctttctcagttatcctccatttatgtaccgttaaaaacatggaaggttatattaattaataattaagtgttttactgattttgtataattcgtcgtttttggcttcatat

SEQ ID NO: 1844 - DNA, 1338 bp, Eutrema halophilum
caccagttaaagtctcgtcctcctctatataaaccaatctctccttccttcattttaatatattctcttctgtattttctccttctctattctccgatttgatccaactctccacagatctcgttttcttcccttctaatggcatcaaacggcgagaaaggactgatcgttagcttcggcgagatgctgatcgatttcgtcccaaccgaatccggagtctccctcgccgaggctcctggattcctcaaagctccaggcggtgctcctgcaaacgtcgccatcgccgtttctcgtctcggtggacgttccgccttcgtcggaaaacttggagacgacgagttcggccatatgctcgctgggattctgaggaaaaacggcgtcgctgatcaggggatcaatttcgacaaaggagccaggaccgccctcgccttcgtcacgttacgtgccgacggagatcgggagtttatgttttaccggaatcccagcgccgatatgctcctccgccctgacgaactcaacctcgagctcatcagatccgccaaagtgtttcattatggatcaataagcttaatagtggagccatgtaggtcggctcacttgaaggcaatggaagtggcgaaagaagcaggagctcttctttcatacgacccaaacctaagggaacctctgtggccatcaaaggaagaagccaagacacagatcatgagcatctgggacaaagctgagatcatcaaggtaagcgacgttgagctggagtttctaactggaagcaacaagatcgatgatgagaccgcattgtccttgtggcatcccaacttgaagctcttgctcgtcaccctcggtgaaaagggatgtcggtattacgccaagaacttccgtggatccgtcgaccctttccatgtggacgccgtggatacaaccggagctggagattcctttgttggtgcccttctaaacaagattgccgatgatcaatccattctcgaggacgaagagagattgagaaaagtgctgagattcgcaaacgcttgtggagcaatcaccacgaccaaaaaaggagccattcctgctcttccctcggaggctgaagttgtcagctttctcgaaggcaaatagaaacaaaagccaacgcaaagcctttattatcacgtaatttgttttctttcacggctctcttctctcttctgtattcttgtttccggatgagagaaacgaattgggggcattgcgctctgttttttgtttctccttcttcaaaatgtaatgatttaaaaaagactctatgtttcaattcaaggcatcacttgctaataaaacgagaagattgttccttaaacc

SEQ ID NO: 1845 - DNA, 1340 bp, Eutrema parvulum
atatccaaaaatctagtatctctctgactctctcctcttaactcactaccgtccgataaacacactccgaccacaaatggctacatccaacggcgagaaaagcttgatcgtgagcttcggcgagatgctcatcgatttcgttcccaccgtctccggcgtatcactcgccgaggctcctggcttcatcaaggcccccggcggtgcacctgccaacgtcgcgatcgccatctctcgtctcggtggtcgctctgctttcgttggaaaactcggtgacgacgagttcggtcacatgctcgccggaatcttgaaacaaaacggcgtatctgccgaaggaatcaacttcgacaccggagccaggacggcactcgcattcgtgaccctaagatcagacggagaacgtgaattcatgttttaccggaaccctagcgccgatatgctcctccggcccgatgagctcaatctcgatctcatcagatctgctaaggtgttccactatggatcaataagcctcattgttgagccatgtcgatctgctcatctgaaggccatggaagtggctaaagaagctggtgctttgctctcgtatgacccaaacttgaggctgcctttgtggccctcgaaggaggaggctaagaagcagattcttagcatctgggacaaagctgaagtgattaaagtcagtgatgaagagcttatgtttttgactggatctgataatgttgatgatgagactgctttgtctctgtggcactctaatctgaaacttctcttggtcactttgggtgacaagggttgtaaatattacaccaagggcttccgtggatctgttgatcctttccatgtgaaggcagtggatacaactggtgctggtgattcatatgttggtgccttgctttgcaagattgttgatgaccgtgctgttctcgaggatgaagctcgtcttagaggagtccttaggtttgcgaatgcatgtggagccattacaactacgaagaaaggagcgattccagctcttcctacagagtctgaggttcagactctcctaaatggaaactgatttacaacaagtctagttttaagatttcacgttttacttttctgttggcttttgttttttttttttgcttcgcttctgtgttcagagaactgtttgattctgttatggatcttgttttattgaactttcttccagggtcttgtattttcggtcactttaatgaataaaaaactcattcccaaatctagtgaacgactgtattaagtagtgagagccttaaagaacaattgcttgaggataacattcagaaacttgcaaatccaatgatctccaaatgtgtttg

SEQ ID NO: 1846 - DNA, 1594 bp, Eutrema parvulum
attatattaatgatcacgctaataccagtggcttcttcaccagttacaagtctcttcgtctctctatataaaccatttctctccttccttcaatttatattattctcttctgttttttttctttctttcaactctctgatttgatccacagatctcgtttcctaatggcatctaacggcgagaaaggactgatcgtgagcttcggcgagatgctgatcgatttcgtccccaccgaatccggcgtctcactcgccgaagctcctggattcctcaaagctccaggcggtgctccagctaacgtcgccatcgccgtttcgcgtctcggtggacgatccgccttcgtcggaaaactcggagacgacgagttcggtcatatgctcgctgggattctgaggaaaaatggcgtcgctgatcaggggatcaatttcgacaagggagccagaaccgccctcgcgttcgtgacgttacgtgccgatggagatcgggagtttatgttttaccggaaccccagcgccgatatgctcctccgtcccgacgaactcaacctcgagctcatcagatccgctaaagtgtttcactatggatcaataagcttaatagtggagccatgtaggtccgctcacttgaaggcaatggaagttgcaaaagaagcaggagctcttctttcatacgacccaaacctaagggaacctctgtggccatcaaaggaagaagccaagacacagatcatgagcatctgggacaaagctgagatcatcaaggtaagcgacgttgagctggagtttctaactggaagcaacaagatcgatgatgagaccgcaatgtccttatggcatcccaacttgaagctcttgcttgtcactctcggtgaaaagggctgccggtattacgccaagaatttccgtggatccgttgaccctttccatgtgaacgccgtggatacaaccggagctggagattcctttgttggtgccttgctgaacaagattgccgatgatcaatccattctcgaggacgaagagagattgagaaaagtgctgagattcgcaaacgcttgtggagcaatcaccacgaccaaaaaaggagccattcctgctcttccctcggaggctgaagttgtcagctttctcgaaggcaaatagaaacaaaagccaacgcaaagcctttattatcacgtaatttgttttctttcacggctctcttctctcttctgtattcttgtttccggatgagagaaacgaattgggggcattgcgctctgttttttgtttctccttcttcaaaatgtaatgatttaaaaaagactctatgtttcaattcaaggcatcacttgctaataaaacgagaagttttgttttccaagtttaagcttaacacgatccgaactctaaagtggagacaaagtacctatattactggtttgaatcagatcacagagaaagcaagggaaatgcaataacagatgagcgtgtgtaggtgcatatgcgaatcaagtgctatatataaggttactagtatcgtccatagttttagcctaggtcagggacaacgaagtaatcttcatcatcatcataccggaactcaagcctaggct

SEQ ID NO: 1847 - DNA, 1398 bp, Ambrosia trifida
tcctcttcaaacaaaacctgcaacttttttcttctttcaatggcttccaccaacggaaccaaccaaaacctaatcgtcagcttcggcgagatgctgatcgacttcgtcccaaccgtctccggcgtctccttagccgaagcaccaggctttctaaaagaccccggcggcgctccggcgaacgtcgccatcgccgtctcaagactcggcggaaagtcggcgttcgtcggaaagcttggtgacgatgagtttgggcatatgttggctgggatcttgaaggagaacggtgtgtgtggtgatggaatatgctttgtataaaggtgcacgtactgcgttggcgttcgttacgttgaaagctgatggtgatcgtgagtttatgttttatcggaaccctagcgccgatatgttgctgacgcctgatgaacttaactttgagattattagatctgccaaagttttccattacgggtcaataagcttgatagtggagccctgcagatcagcacatcttaaagcaatggaggttgcaaaggaagcaggggcacttctgtcatatgacccaaatctccggctgccattgtggccatcagcagatgaggcacgtgagcaaatcatgagcatatgggacaaggccgaggtgatcaaagtgagtgataacgagcttgaatttctcacaggaagtgacaagattgatgacgagtcagcaatgtctttgtggcaccctaatttgaagcttctgttggtcactcttggtgaaaaaggttgcaactactacaccaagcattttcatggtacggtggctgcattccctgtgaaagcagtggacacaacaggcgcaggtgactcttttgttggtgctcttctcacaaagatagttgatgaccaatccgtgctagaggatgaagcaaagttgaaagaaatactgagatactcgtgtgcctgtggagcgatcacgaccaccaaaaagggtgcgatcccggcccttcctaccgtgccagagcttgacgcctttttgaaagcgcatccttagatagtattttcggcgtccattttgtttttgtgttcttttttcacaaatctttgttatcactacatacacaacaatcatccattaaagtcaaacatcaactccatcactaaaaaaacgccatagttggccaacacaagggtctcattaagttgtaacaaaactagaaacaaaaactttgattcttggtaaaattttactaactgcaaaaccaccttagaatccaagcttggttctgcgccaatgcctgcgctttgcgttgtacctgattgtgttgtcagtcctcatgcgaatccagtgaggaatgggcctgttctgcctcatcttcttcgcgagcttcttcttgatcatgaaagtcttgtgggacggcatgg

SEQ ID NO: 1848 - DNA, 1055 bp, Brassica napus
ccacaaatggctacttccaccggcgagaatagcttgatcgtttccttcggcgagatgctcatcgacttcgttcccaccgtctccggcgtatccctcgctgaagctcctggcttcatcaaggcccccggtggcgcacctgccaacgtcgccatcgccgtttcccgtctcggtggccgagctgcttttgtcggaaagctaggtgacgacgagtttggccacatgctcgccggaatcttgaaacaaaacggcgtctctgccgaaggtatcaacttcgatactggagctaggacggcgcttgcgttcgtgacgttaagatccgatggtgaacgtgagttcatgttttaccgggaccctagcgccgacatgctcctccgtcctgatgaactcaatctcgatctcatcaaatctgctaaggtgttccactatggatcgataagcctcattgttgagccatgtagatctgcgcacctgaaagccatggaggtggctaaagaagctggtgcgttgctctcgtacgacccaaacctgaggctgccattgtggccctcgaaggaggaggctaagaaacagatccttagcatctgggacaaagttgaagtgatcaaagtcagcgacgaagagcttatgttcttgactgggtctgatatgttgatgatgagactgctttgtctctggtgcatgataacttgaaacttctcttggtcactttgggtgaaaagggttgtaactattacaccaagagtttccgtggatctgttgatcctttccatgtgaacgcagtggatacaactggtgccggtgattcatatgttggtgccttgctttgcaactttgttgatgaccgctctgttctcgaggacgaagctcgacttagagaagtgcttaggtttgcgaatgcatgtggagccattacaactaccaagaaaggagctattccagctcttcctacagagtctgaggttcagagtctcctcaatggaaactgatctaggagtctaggacatgtctggtcttacgatttcacgttttttttatttccttttgttttcgttcag

SEQ ID NO: 1849 - DNA, 1275 bp, Chenopodium quinoa
aactttctctctctactttcttcctctctcaacaatggcagaaaccaccaccaacaatggcggactctcaatcaatggcgccgattccaaaggcctagtcgtcagtttcggcgagatgttgatcgacttcgttccgacagtttccggcgtttctctcgccgaagcgccgggattccttaaagctcccggcggcgctccggcgaacgttgcgatcgccgtcgcgaggctcggcggtaaagccgccttcgtcggaaaactcggtgatgatgagtttggtctcatgctcgccggaattctcaagaaaaacggtgtttccggcgatggtttgacgttcgatcaaggtgcgagaactgctctcgctttcgttacactgaaagctgatggtgaaagggaattcatgttttaccggaatccgagtgctgatatgcttcttactcccgatgagctcaacctcgaccttattcgatcggctaaggtgtttcactatggttctattagtttgatcgtcgagccatgtaggtcagcccatttgaaagcaatggaggaagccaaaaaggctggagctttgctctcatatgatcccaaccttaggctacctttgtggccttccgcaaaggaggctcgtgagcagatcttgagcatctgggacaaggccgaggtgatcaagatcagtgacaacgagcttgagttcctcacagaaaaaaacaccatcgatgatgctactgcaatgtcattgtggcactctaatttgaagcttctattggttactcttggtgaccatggttgcagatactacaccaagaacttcaagggaagtgtggaggcattcaaggtgactgctattgacacaaccggtgctggtgactcctttgttggtgccttgttaggcaaaatcgtcgatgatcactctattattgaggatgaaccccgattgaaggaagctttgaaattcgccaacgcatgtggagccattacaaccaccaagaagggtgcaatcccagctcttcctacagaagccgaagcctttgagctcatcaagaaggcttctcagtgatttcatactgttaattcatttgtgtgttagatctcttggtttgcttggttttttcgggatttgattagtgaattgaagagaattaggaagttatggggggaaaattcaactctaaaattttctccactgtgtaatgataaacaagtcttttatataagtatcgataaataaatattttgaattatgcgtcgttttgccattcaaaatatttatttattaat

SEQ ID NO: 1850 - DNA, 1313 bp, Euonymus alatus
ctctctctcgcaattcagaattatcaaacaaaccaatggcttcaaaggcggataataacactggctctctcatcgtcagcttcggcgagatgctcattgattttgtgcccacggtttccggcgtctcactggcggaggcccccggatttctcaaggctgccggtggcgcaccggctaatgttgcaatcgcagtcgccagactcggcggtcatgcggcctttgtgggtaagctaggtgatgacgagttcggccacatgctcgccgggatcctccgtgagaacggtgtcagcacgaaagggatcaactttgatcttggagctcgcactgccttagcgttcgttacactacgcgccgacggagatcgtgagttcatgttctacaggaatcctagcgccgacatgctcttgacccccgaagagctcaatctggagctgattagatccgcgaaggtgttccattacggatcgataagcttgattgtggagccatgcagatcagcacatctgaaggcaatggaggccgcaaaagacgcgggtgccctgctctcgtacgaccctaacttgaggctgccgctgtggccatcaccggcggaggcgcgtgagcagataatgagcatctgggacaaggcggaggtgatcaaggtcagtgatgttgagctggagttcttgacagggagtggcaaaatcgatgatgcggatgccttgtctctgtggcatcccaacttgaaacttcttttggtcactcttggtgacaagggttgcagatactacaccaagaacttccatgggcaagtggatgctttcaatgtgaaagctgtagatacaacaggagcaggtgatgcattcgttggagccttattatccaagatagtcgatgaccgatctgtaattgaggacgaacaaaggctgagggaagtactcaaatttgcaaatggatgtggagccattacaactacaaagaagggagccattcctgctcttccaaccacatccgaggtccttactttagtcaaagggaaacaagtttaaagctactattctttaacctttttatctttctctctacttttgctttaaatttccatacatagggagttttcttctggctattcaatgggcggttttaattttagtctattatgttattcaacgagtgtccttgttaatgattgaaaactcgtgggttttattgagttttaactgaataaatttttgattttgacgttcctgaaaggtcaatcgcccagttttctatgttgcaatacctaatttgaggaggaacaataaaaataaaaatacaatgggaagattagt

SEQ ID NO: 1851 - DNA, 1162 bp, Chenopodium quinoa
attcaactttctctctctactttcttcctctctcaacaatggcagaaaccaacaacaacaatggtggactctcaatcaatggcgccgattccaaaggcttagtcgtcagtttcggagagatgttgatcgactttgttccgacagtttccggcgtttctctcgccgaagcgccgggattccttaaagctcccggcggcgctccggcgaacgttgcgatcgccgtcgcaaggctcggcggtaaagccgccttcgtcggaaaactcggtgacgatgagtttggtctcatgctcgccggaattctcaagaaaaacggtagtttccggtcgatggtttgacgttcgatcaaggtgcgagaactgctctcgctttcgttacactgaaagccgacggtgaaagggaattcatgttttaccggaatccaagtgccgatatgcttcttactcccgatgagcttaacctcgatcttattcgatcggctaaggtgtttcactatggttctattagtttgatcgtcgagccatgtaggtcagcccatttgaaagcaatggaggaagccaaaaaggctggagctttgctctcatacgatcccaaccttaggctgccattgtggccttccgccaaggaggctcgtgagcagatcttgagcatctgggacaaggccgaggtgatcaagatcagtgacaacgagcttgaattcctcacagaaagcaacaccgtcgatgatgctactgcaatgtcattgtggcactctaatttgaagcttctcttggtcactcttggtgaccatggttgcagatactacaccaagaacttcaagggaagtgtggaggcattcaaggtgactgctattgacacaaccggtgctggtgactcctttgttggtgccttattaggcaaaatcgtcgatgatcactctattattgaggatgaaccccgattgaacgaagctttgaaattcgccaacgcatgtggagccattacaaccaccaagaagggtgcaatcccagctcttcctacagaagccgaagttttggagctcatcaagaaggcttctcagtgatttcatactgttagggtggttaattcatttgtgtgttagatctctcttggtttgcttggctttttcgggatttgattagtgaattgaagagaattaggaagt

SEQ ID NO: 1852 - DNA, 1095 bp, Brassica oleracea
atcccacagatctcgttctcttccccaatggctgcatccaacagcgagaaaggactcatcgtcagcttcggcgagatgctcatcgacttcgtccccaccgaatccggcgtttcgctcgccgaagctcctggcttcctcaaagctcccggcggcgctccggcaaacgtcgccatcgccgtttcgcgactcggcgggcgatccgccttcgtcggaaagctcggtgacgacgagttcggacacatgctcgctgggatcctgagggagaacggcgtcgctgatcaggggattaacttcgacacgggagctagaacggctttagcgttcgtgacgttgcgtgccgacggagatcgggagtttatgttttaccggaaccccagcgccgatatgctcctccgtcccgatgaactcgacctcgacctcatcagatccgctaaagtgtttcactacggatcaataagcttaatagtggagccatgtaggtcagctcacttgaaggccatggaagtggcgaaagaagccggagccattctttcctatgacccgaacctcagggagcctctgtggccatcaaacgaagaagccaagacacagatcatgagcatctgggacaaggctgagatcatcaaggtcagcgacgtcgagctcgagtttctgactggaagcaacaagatcgatgatgaaaccgcaatgtccttgtggcatcccaacttgaagctcttgcttgtcactcttggtgaaaagggatgccggtattacgccaagacattccgtggatccgttgaccctttccatgtgaacgccgtggatacaaccggagctggagattcctttgttggtgctctcctaaacaagattgctgaggatcaatccattctcgaggacgaagagagattgagaaaggtgctaagattcgcaaacgcttgtggagcaatcaccacgaccaagaaaggagccattccagctcttcccaccgatgctgaagttcacagctttcttgaagggaagtaaaaaaaataaaaacacccctcaagctttctccatgtaatctgtgttcgcttatgtattcttgttttctgatgtttggtttaaatcaat

SEQ ID NO: 1853 - DNA, 1090 bp, Brassica napus
ttcccccttcatttttatattactctctcctctatcgctctttcacttctccgatttgatctaaacgatcccacagatctcgttctcttccccaatggctgcatccaacagcgagaaaggactcatcgtcagcttcggcgagatgctcatcgacttcgtccccaccgaatccggcgtttcgctcgccgaagctcctggcttcctcaaagctcccggcggcgctccggcaaacgtcgccatcgccgtttcgcgactcggcgggcgatccgccttcgtcggaaagctcggtgacgacgagttcggacacatgctcgctgggatcctgagggagaacggcgtcgctgatcaggggattaacttcgacacgggtgctagaacggctttggcgttcgtgacgttgcgtgccgacggagatcgggagtttatgttttaccggaatcctagcgccgatatgctcctccgtcccgacgaactcgacctcgacctcatcagatccgctaaagtgtttcactatggatcaataagcttaatagtggagccatgtagatcagctcacttgaaggccatggaagtggcgaaagaagccggagccattctttcctatgacccgaacctcagggagcctctgtggccatcaaacgaagaagccaagacacagatcatgagtatctgggacaaggctgagatcatcaaggtcagcgacgtcgagctagagtttctaactggaagcaacaaaatcgatgatgaaaccgcaatgtccttgtggcatcccaacttgaagctcttgcttgtcactctcggtgaaaagggatgccggtattacgccaagactttccgtggatcggttgaccctttccatgtgaacgccgtggatacaaccggagctggagattcctttgttggtgctctcctaaacaagattgctgaggatcaatccattctcgaggacgaagagagattgagaaaggtgctaagattcgcaaacgcttgtggagcaatcaccacgaccaagaaaggagccattccagctcttcccaccgatgctgaagttcacagctttcttgaagggaagtaaaaaaaataaaaacac

SEQ ID NO: 1854 - DNA, 1270 bp, Cichorium intybus
cctctctttcatcttcaatttcttgctcaatcaaaaatggccgccaacaatggagtcgttaaggagggaggattaatcgtcagcttcggtgagatgctgatcgactttgtgccgaccgtttccggcgtgtcgctagcagaggcgccggggtttttgaaggcaccaggtggtgctccggcaaacgtcgcgatcgcggtctcaaggcttggcggaaagtcggctttcgtcggtaaattaggagacgatgagttcggccacatgctcgccgggatcttgaaggaaaacggcgtcaacggcgaaggaatcaacttcgataaaggagcacgcactgctctggcatttgttacactgaaagccgacggcgatcgcgagttcatgttctaccggaaccctagcgccgacatgttattgactcccgatgaactcaaccttgagctcattagatctgcgaaagtatttcactacgggtcaataagtttgatagtggagccatgcagatcggcgcatcttaaagcaatggaggtggcaaaagatgcaggggcacttttgtcatatgacccaaatctccggctgccactgtggccgtcgccggaggaggcacgtgagcagatcatgagcatatgggacaaggcggaagtgattaaagtgagcgataatgaactcgaatttctcaccggaagtaacaaaattgacgatgaagccgccatgtctttatggcaccctaatttgaagcttttattggtcactcttggtgacaaaggttgcaattactacaccaagcattttcatggaaccgtgggtgctttccccgttaaagctgtagacacaaccggcgccggagactcttttgtcggtgccctattgactaaaattgtcgatgaccaatccgtactagaggacgaagggaaattgaaggaaatactgagatactcatgtgcttgtggggccatcaccacgactaaaaagggcgcaattcccgccctccctaacgtgtcggaagttcacagttttcttaatgctcctcatcattagggaatattccggtggtctattcttcatgttcatgttcatgttgatgttcttctttcttcattgaataataatggttttgtgttatgatccatcaatgttttcaattgaaacaaacgatgacaacgagtagtgaaaaccagggattttgtgattcatctggtgtgggtttgtatgtctagattgttttgttgcttgttttgtgttctacaaaatgtttgagttaaatgccaaaatttcc

SEQ ID NO: 1855 - DNA, 1410 bp, Cichorium intybus
aggggcggggatgaatattggctttatatataccccactcccaaaactcttttcttcctctctttcctcttcaatttcttgctcaatcaaaaatggccgccaacaatggagtcgttaaggagggaggattaatcgtcagcttcggtgagatgctgatcgactttgtgccgaccgtttccggcgtgtccctagcagaggcaccaggatttttgaaggcaccaggtggtgctccggcaaacgtcgcgatcgcggtctcaaggctcggcggaaagtcggctttcgtcggtaaattaggagacgatgagttcggccacatgctcgccgggatcttgaaggaaaacggcgtcaacggcgaaggaatcaacttcgataaaggagcacgcactgctctggcatttgttacactgaaagccgacggcgatcgcgagttcatgttctaccggaaccctagcgccgacatgttattgactcccgatgaactcaaccttgagctcattagatctgcgaaagtatttcactacgggtcaataagtttgatagtggagccatgcagatcggcgcatcttaaagcaatggaggtggcaaaagatgcaggggcacttttgtcatatgacccaaatctccggctgccactgtggccgtcgccggaggaagcacgtgagcagatcatgagcatatgggacaaggcggaagtgattaaagtgagcgataatgaactcgaatttctcaccggaagtaacaaaattgacgatgaagccgccatgtctttatggcaccctaatttgaagcttttattggtcactcttggtgacaaaggttgcaattattacaccaagcattttcatggaaccgtgggtgctttccccgttaaagccgtagacacaaccggcgccggcgactcttttgtcggtgccctattgactaaaatcgtcgatgaccaatccgtactagaggacgaagggaaattgaaggaaatactgagatactcatgtgcttgtggggccatcaccacgactaaaaagggcgcaattcccgccctccctaacgtgtcggaagttcacagttttcttaatgctcctcatcattagggaatattccggtggtctattgttcatgttcatgttgatgttcttctttcttcattgaataataatggttttgtgttatgatccatcaatgttttcaattgaaacaaacgatgacatcgagtagtgaaaaccagggattttgtgattcatctggtgtgggtttgtatgtctagattgttttgttgcttgttttgtgttctacaaaatgtttgagttaaataccaaatttcaaaattatttcttcattttactcgatattattgttaaaacattgtaagtctatgatcaaataaattaaaactatggttccttaatatattgt

SEQ ID NO: 1856 - DNA, 1235 bp, Cucumis melo
tttctaatttaccgatcactctcactcccaaccatggcttccaccaacggcgctttgccttccggctccggtttgatcgtcagtttcggcgagatgttgatcgatttcgtccccacagtatccggcgtctctttagccgaggcaccaggatttctcaaggctcccggtggtgctccggccaacgtcgcgattgccgtcagccgactcggcggacgtgctgccttcgtaggaaagctcggcgatgatgagtttgggcgtatgttggaaggaatagttaaggagaacggcgttgacgcttccggaatccgcttcgatcaaggcgctagaaccgccttggctttcgtcactctacgcgccgacggtgagcgtgagttcatgttctaccggaaccctagcgccgatatgcttctcaagccggaggaattggatctcgatctcatcagatccgccaaaatctttcactatggatcaataagtttgatcgtggagccctgcagatcggcacacataaaagcaatggatgaggctaagaaagcaggtgttttactttcatatgacccaaatttgaggctgcctttgtggccctctgcaaatgaggctcgtgaacagatcaagagcatttggaacaaggccgacatcatcaaggtcagtgatgaggagctcaaattcctcacccagaaagataaggttgatgatgaaaacgccatgtctctctggcacgatggcttgaagctcctcctcgttactctcggcgagcaaggctgcagatactacaccaagaacttccgtggctgtgtggatccattcaaggttaaggctgtggacacaaccggagccggtgactcattcgttggtgctctcctttccaagatcgtcgacgaccaatcagtgcttcaggatgagaagaagctgagggatatattgaggtttgcgaatgcttgtggagccattacaacaaccaagaaaggagcaattccagctcttccaacagaggctgacgtggctgccttgatcaaggcttcttcttagacactgcatagagagattattgattcccctcttttttcttcttcttcttcttctttcttttttcttgtttagatttttggtcttctcaattgaatttaaagaaaagggtttgtgaaggtcgtttcaattttcctctttttagactctttgagcttaacgtattttcttaataaaaagcttctctacattttgattaaaaaaaaaaa

SEQ ID NO: 1857 - DNA, 1424 bp, Spinacia oleracea
atcaaaattcaattttctccttataatatttcgctctttatatagtccctcccatcaccctcctttcccatctccttattttccctctctccaaaattcagccttatttttgtacctctctcattctttatttttctctttctcaacaatggctacacccaacaatggcgaacttccaaacggtgccgacaccaaaggcttagtcgtaagcttcggtgagatgttgatcgactttgtgcccactgtctccggcgtatccctcgccgaagcgccgggattccttaaagctcccggaggcgctcctgcgaatgtcgcgatcgcggtgtcaaggctcggaggaaacgccgctttcgtcggaaagctaggagatgacgagttcggaaacatgctcgccggaatccttaaagaaaacggagtttccggcgatggattgacgttcgataaaggcgcgagaactgctctcgctttcgtcaccttgaaagctgacggtgatagagaattcatgttctaccgtaatcctagcgccgatatgcttctcactcctgaagagcttaacctcgatctcattcgatcggctaaggttttccattatgggtcaattagtttgattgtggagccttgtagatcggctcatctgaaagcaatggaggaggccaaaaaggccggagctctgctttcgtatgaccccaaccttcggttgccattgtggccttccgccaaggaggctcgtgagcagatcttgagcatctgggacaaggcagaggtgatcaagattagtgacaacgagttggaatttcttacagaaaccaacacaatcgatgatgctactgcgatgtcattgtggcaccctaacttgaagcttctcttggtcactcttggtgaccatggttgcaaatactacaccaagaacttcaagggaagtgtggacgcattcaaggtaaaagcagttgatacaactggagctggtgactcatttgtcggtgctttgctaggcaagatggtcgatgatcactctattattgaggacgaatcaagattaagagaggcattgacatttgctaatgcatgcggagctattacaaccacaaagaagggagcaatcccagctcttcctacagtagaggatgttaaggagctcattaacaaggcgtcaaactgatttctttcgtgttgtcattctttgttgttagatctctgtgtttctgttatggagtttgtgttcatttaccgggatttaattaattagtgaattcaagagaattaggggtgtgtgggggaataaatatgttgtattatgcgtctttttgcaattcaaagaggcaattatagatatccatggcgtgcacctagtttttgagtttactttgcccctttctattttttattctgaatgtcttttacattattgtatgactatatcacac

SEQ ID NO: 1858 - DNA, 1264 bp, Triphysaria pusilla
cttccaattttctcctattcaaaattcaatacacagataatatcattcgattttcattccttttttcgatacataatctgaaatggcggcgaacaatagcgatctcggcaagggcttgattgtgagtttcggcgagatgttgatcgatttcgtaccgactgtctccggcgtgtcactggcggaggctccaggatttctcaaggcacccggcggcgctccggccaacgtggccatagctgtggccaggctcggcgggaaggcggcgttcgtcggcaagctcggcgaggacgagttcggacacatgctcgccgggatcctgaaggagaacggcgtctccgccgatggcgttacattcgacaagggagcgcgcacggcgctggcgtttgtgaccctacgcgccgacggcgagcgtgagtttatgttctataggaatcccagcgccgacatgcttctcactccggacgagctgaatctggggattattagatctgctaaagtatttcactatggatcaataagcttaatcgtcgagccatgtagatcggcccatttgaaggcaatggacgaggccaagtctgcaggggcattattgtcatacgacccaaacctccgactgccactctggccgtcggcaaagtacgctaaggagcagatcatgagcatttgggaaaaagctgacatcatcaaggtcagcgacaatgagctcgagtttctgaccggtagcagcaagattgacgacgaagctgctatgtccttatggcaccctaagttgcagctccttttagtcactcttggtgaaaagggatgcagatattacaacaagaatttccgtggatctattgatgggtaccatgtgaagacagtagacacaactggagcgggagactcgtttgtgggagcccttcttggaaagattgttgatgaccattctattattcatgatgaggcaaggttgaaggaggtgttgaaatatgcttgtgcttgtggagccataaccacaaccaaaaagggtgcaattccagctcttccccaacactccgaagtcctttccattctcaacggagcaaagtagaggaaaaaaaactacacatcaagtcttatttgtatttcttattcaattttcaagtcttgagtttatatcatgaacgagtttttgcattgcaaatttgatgtctcagcttaaggttgacatttcctttgtgtacatttgtaatgttgacacaataagtggtgataattaataaataaatcttagcatagcctt

SEQ ID NO: 1859 - DNA, 1241 bp, Triphysaria pusilla
cttccaattttctcctattcaaaattcaatacacagataataatatcatttaatttccatttactttttcgatacataatctaaaatggcggcgaacaatagcgatctcggcaagggcttgatcgtgagtttcggcgagatgttgatcgatttcgtaccgacagtttccggcgtgtcactggcggaggctccaggatttctcaaggcacccggcggcgctccggcaaacgtggccatagctgtggtcaggctcggcggaaaggcagcgttcgtcggcaagctcggcgaggacgagttcggacacatgctcgccgggatcctgaaggagaacggcgtctccgccgatggcgttacattcgacaagggagcgcgcacggcgctggcgtttgtgaccctacgcgccgacggcgagcgtgagtttatgttctataggaatcccagcgccgacatgcttctcacaccggccgagctgaatctggggattattagatctgctaaggtatttcactatggatcaataagcttaatcgtcgagccatgtagatcggcccatttgaaggcgatggacgaggccaagtccgcaggggcattattgtcatacgacccaaatctccgactgccactctggccgtcagcaaagtatgctaaggagcagatcatgagcatttgggaaaaagctgacatcatcaaggtcagcgacaatgagctcgagtttctgaccggtagcagcaagattgacgacgaagctgctatgtccttatggcaccctaagctgcagctccttttagtcactcttggtgaaaagggatgcagatattacaacaagaatttccgtggatctattgatgggtaccatgtgaagacagtagacacaactggagcgggtgactcgtttgtgggagcccttcttggaaagattgttgatgaccattctattatccatgatgaggcaaggttgaaggaggtgttgaaatatgcttgtgcttgtggagccattaccacaaccaaaaagggtgcaattccagctctgccccaacactctgaagttctttccattctcaacggggcaaagtagacaaaaaaacctacacatcaagtctttgtttgtattttcttattcaattttcaagtcttgagaaacatgaacgaatttttgcattgcaaatttgatatctcagcttaaggttgacatttctttgtgtacatttgtaatgttgacataataagttgtgataattaat

SEQ ID NO: 1860 - DNA, 1219 bp, Triphysaria pusilla
cacagataatatcatttaattttcatttcctttttcgatatacaatccaaaatggcggcgaacaatagcgatctcggcaagggcttgatcgtgagtttcggcgagatgttgatcgatttcgtaccgacagtctccggcgtatcgctggcggaggctccaggatttctcaaggcacccggcggcgctccggccaacgtggccatagctgtggccaggctcggcgggaaggcagctttcgtcggcaagctcggcgaggacgagttcggacacatgctcgccgggatcctgaaggagaacggcgtctccgccgatggcgttacattcgacaagggagcgcgcacggcgctggcgttcgtgaccctacgcgccgatggtgagcgtgagtttatgttctataggaatcccagcgccgacatgcttctcaccccggacgagctgaatctggggattattagatctgctaaggtttttcactatggatcaataagcttgatcgtcgagccatgtagatcggcccatttgaaggcgatggacgaggccaagtccgcaggggcattattgtcatacgacccaaacctccgactgccactctggccgtcggccaagtatgctaaggagcagatcatgagcatttgggaaaaagctgacatcatcaaggtcagcgacaatgagctcgagtttctgaccggtagtagcaagattgacgacgaagctgctatgtccttatggcaccctaagttgcagctccttttagtcactcttggtgaaaagggatgcagatattacaacaagaatttccgtggatctattgatgggtaccatgtgaagacagtagacacaactggagcgggtgactcgtttgtgggagcccttcttggaaagattgttgatgaccattctattatccatgatgaggcaaggttgaaggaggtgttgaaatatgcttgtgcttgtggagccataaccacaaccaaaaagggtgcaattccagctctgccccaacactctgaagtcctttccattctcaacggggcaaagtagagagaaaaaactacacatcaagtcatcaagtctttgtttgtattttcttattcaattttcgagtcttgattttatatcatgaacgagtttttgcattgcaaatttgatatctcagcttaaggttgacatttctttgtgtacatttgtaatgttgacacaataagttgtgataattaat

SEQ ID NO: 1861 - DNA, 1427 bp, Rosmarinus officinalis
ttctactacccctaccccatctctatataaacacctctcacccttccatttctctcatctaattttctgtagcaaatatacacacactgacgcataaatacacatagttacgtacactatatttatcgttttcgtatattcactctatcaatacagcaatggcaaattcaggcgccggccagggactggtcgtgagtttcggcgagatgctgatcgattttgtggtatatttattgttttttcgtatattcactcttatcaatacagcaatggcaaattcaggcgccggccagggactggtcgtgagtttcggcgagatgctgatcgattttgtgccgaccgtctccggcgtgtcgctggcggaggcgccggggttcctcaaggcccccggcggcgcccctgccaacgtggcgatcgccatcaccaggctcggagggaagtcggcgttcgtcggaaagctcggcgacgacgagttcggccacatgctcgcaggaattctgaaggagaacaaggtctccgccgaaggagtccctttcgacaagggcgcgcgcaccgcccttgcgttcgtgaccctacgcgccgacggcgagcgtgagtttatgttctacaggaatcccagcgctgacatgctcctcaagccggaggagttgaatctcaatcttatcaaatctgccaagattttccactatggatcaatcagcttgatcgtggagccatgcagatcagcccacatgaaggccatggatgaggccaagaaagctggggcattgctctcatacgatcccaacctccgcctgcctctctggccgtcggcggagtatgccaaggagcagatcttgagcatctggaacaaggcggatttgatcaaggttagcgacaacgagctcgaattccttactggaagcaacaagatcgatgatgaatccgcaatgtcgttgtggcaccccaacttgaagctgcttttggtcacactcggagacaagggctgcaaatactacgcaaagaacttcaaaggatgtgtgtctggcttcagtgtcaagacggttgacaccaccggagcgggtgattctttcgttggagccctcctcgcgaagatcgttgatgaccattccatcattcaggatgaggcgaagttgaaggaagtgttgaagtatgcatgtgcatgtggcgccataaccacaaccaagaagggtgccatcccggctcttcctgccccctctgaggtgcttgaagttctcaaaaccggaggaaaataggcagcagcagttgtgtatgtctgtttattccagtttacttggggaatttttagagttccgaaatggtggttctaccatgaacattttttctctcttttgcattgttacctttacttgagtttagatttcttttcacacattgtaatgaatgcggaggcattttcaaaattg

SEQ ID NO: 1862 - DNA, 1175 bp, Daucus carota
gtttgatcagtagtctgtttctaaatagtctccgccggatcctcctctatttatataagaataaactcatctctctctcacaagtcataaacgtagactacaaataaatctctttctctctctaaagactagtaataatggctggtggcgatttgatcgtgagcttcggcgagatgctgatcgacttcgtgccgacggtgtcgggcgtttcactggcggaagcaccgggattcctcaaagctccgggaggcgcgccggcgaacgtggcgatcgcggtggcgaggctgggaggaaaggcggcgttcgtcgggaagctaggagacgacgagttcggtcacatgctcgccggaatactcaaggagaatggagtgtccggcgacggaatcaagttcgatcaaggagctcgaacagcgctggcgttcgtgacactacgcgccgacggggagcgtgagtttatgttctacaggaatccgagtgccgacatgttgttgactcccgaggagttgaatctggatctcatcaaatctgccaaagttttccattacggatctatcagtttaattgtggagccctgcagatcagcgcatttgaaggcaatggaggccgcaaagcaagcgggttgcctactttcatatgacccaaacctgaggctaccactatggccatcagccaaggaagcacgcgagaaaattatgagcatatgggacaaggctgatgtgatcaaagtcagcgacaacgaattggaatttctcaccggcaaagaggtcagtgacgaggcagcattgtccttgtggcatcctaatttaaagcttcttctggtcactcttggtgaaaaaggttgcagttactataccaagaatttccatggaactattcctggtttccatgtgaaaactgttgatacaactggtgcaggagactctttcatcggtgccctgttatgtaagatggttaaggatcaatctgtgatcacggatgaagcaaagttaaaggaagttctcaagtttgcatgtgcatgtggagccatcacaaccacaaagaaaggagcaatcccagccctgcccacagaatctgaagccctcacacttctcaagggcaattagatcaaagacccacccatctgtgtctgtttttacctttcatcttgccttaattcctgttcaagctactttttt

SEQ ID NO: 1863 - DNA, 1240 bp, Triphysaria pusilla
cttccaattttctcctattcaaaattcaatccacagataatatcatttaattttcatttcctttttcgatatataatctgaaatggcaactaacaacagcgatctcggcaagggcttgattgtgagtttcggcgagatgttgatcgatttcgtaccgacagtctccggcgtgtccctggcggaggctccaggatttctcaaggcacccggcggcgctccggccaacgtggccatagctgtggccaggctcggcggaaaggcagcgttcgtcggcaagctcggcgaggacgagttcgggcacatgctcgccgggatcctgaaggagaacggcgtctccgccgatggcgttacattcgacaagggcgctcgcacggcgctggcgtttgtgaccctacgcgccgacggcgagcgtgagttcatgttctataggaatcccagcgccgacatgcttctcaccccggacgagctgaatctcggaatcattagatctgctaaggtatttcactatggatcaataagcttaatcgtcgagccatgtagatcggcccatttgaaggcgatggacgaggccaagtccgcaggggcattattgtcatacgacccaaacctccgactgccactctggccgtcagccaagtatgccaaggagcagatcatgagcatttgggaaaaagctgacatcatcaaggtcagcgacaatgagctcgagtttctgaccggtagcagcaagattgacgacgaagctgctatgtcgttatggcaccctaagttgcagctccttttagtcactcttggtgaaaagggatgcagatattacaacaagaatttccgtggatctattgatgggtaccatgtgaagacagtagacacaactggagcgggtgactcgtttgtgggagcccttcttggaaagattgttgatgaccattctattatccatgatgaggcaaggttgaagggggtgttgaaatatgcttgcgcttgtggagccattaccacaaccaaaaagggtgcaattccagctctgccccaacactctgaagtcctttccattctcaacggagcaaagtagaggaaaaaaactacacatcaagtcttatttgtatttcttattcaattttcaagtcttgagtttatatcatgaacgagtttttgcattgcaaatttgatgtctcagcttaaggttgacatttctttgtgtacatttgtaatgttgacacaataagttgtgataattaat

SEQ ID NO: 1864 - DNA, 1491 bp, Conyza canadensis
aaaaatggcatcaaacggatcatcaaccaaaccccaccacccactaatcgtcagtttcggcgagatgttaatcgacttcgtccccaccgtctccggcgtgtcgttggcggaagcaccggggttcttgaaagcaccaggcggagctccggcgaacgtggcaatagcggttcaaagactaggtgggcgatcagcgtttgtggggaaactaggtgacgatgagtttggtcatatgttggccggaatattgaaagaaaatggagttaacggtgacggaatatgctttgatgaaggagctaggacggcgttagcttttgtgacgttgaaagctgacggagaacgtgagtttatgttttatcggaatccgagtgctgatatgttgttgactcctgatgaattgaatcttgatcttattagatctgccaaagttttccattatggttcaataagcttgattgtggagccttgtagatcagcacatcttaaggcaatggaggtagcaaaggaagccggggcacttctttcatacgaccccaatctccgtctgccattgtggccgtcaccagaagaggcccgcaagcagatcttgagtatttgggacaaggctgaagtgatcaaggtgagcgataacgagcttgaattcctcacaggaagtcacaagattgatgatgaagctgcaatgtctctatggcatcctaacttgaagcttcttttggtaactcttggtgacaaaggttgcaattactacaccaagcatttccatgggacggtcggtgcattcccagtgaaagcagttgacacaactggtgcgggtgactctttcgttggtgccctcctaacaaagctagttgatgaccaatctgtgctagaggatgaagcaaagttgaaagagatattgagatattcttgtgcttgtggagctatcaccaccaccaaaaagggtgcaattccggcccttccatcagtggcggaggttcataccttcctcgatgcgcaacattagtagcaaatatgtccatcgttgtatctttcgtttttctttttatttccaacaaataaaaatttctttgaaattgttttgtattagcttgcaagcaacggttaaagcaacataagtggtttgcattaggacaaagagtttgagtcatttcaattagcgaaagcccgtgatttagtgattcaacgctagtgggctttgtttgtgtagttttagatggtttgtttttaatcctctaaatttttacttgatttcttttggtcatgtattgtgtttttaacggatttaccaattagttaaaaaattgaagagaaatatttaaagtgtttatgtaacacccgtgaaatttgactatattgaccttaattgacttttgttgaatatgtaaattatttgtgaatctaattggaatatcggtacttattatgttccttaattgacttttgtttaatatgtaaattatttgtgaatcatcattatatgttgcttattatgtt

SEQ ID NO: 1865 - DNA, 2168 bp, Brassica oleracea
cgggcaaaggttggaataggtaagtgagattttgaccagatttttgcattttattagaaactcatgtttttggaaaaaacatatattttctagactatggatatttcaacaaaatccacaaaaaaaaacatttaatactattaaattaaaatgaagcagctagcttcttcaccagttaaacaagagtctataaaaacactcccctccttcattttatattactactctcctatctttgatctctcaataatcattccaacagatctgatggcacccaccggcgagaaaccactcatcgtcagcttcggcgagatgctcatcgacttcgtccccaccgagtccggcgtctccctcgccgaagccccgggcttcctcaaagcccccggcggcgctcccgccaacgtcgccatcgccgtctcccgcctcggcggacgatccgcgttcgtcggaaagctcggcgacgacgagttcggccacatgctggccgggatcctgaggaaaaacggcgtcgccgatcagggcatcaacttcgatacgggagcaaggaccgccttggcgttcgtgacgttgaaggccgacggagatcgggagtttatgttttaccggaatcccagcgccgatatgctcctccgtcccgatgagctcgacctcgagctcatcagatccgctaaagtgtttcactatggatcaataagcttaatagtggagccatgtaggtcggctcacttgaaagccatggaagtggcgaaagaagccggagctcttctttcctacgacccaaacctcagggagcctctgtggccatcgaaggaagaagccaagacacagatcatgagcatctgggacaaggctgagatcatcaaggttagcgacgttgagcttgagtttctaactggaagcaacaagatcgatgatgagaccgcaatgtccttgtggcatcccaacttgaagctcttgcttgtcactctcggtgaaaagggttgccggtattacgccaagaacttccgtggatccgttgaccctttccatgtgaacgctgtggatacaaccggagctggagattcctttgtaggtgccctcctaaacaagattgccgatgatcactccattctcgaggacgaagagagattgagaaaggtgctaagattcgcaaacgcttgtggagcaatcaccacaaccaagaaaggagctattccagctcttccttcagaagctgaagttctcagctttcttgaaaagaaatgaaaaaacaaaagtaaagctttctgcacgtaatctgtttccgcttttgtattcttgtttaaggggcactctgctctgtttttgtttctctcttcttcaaatgtaacgatttaaaaagacagtatgtttcaaattcaaggcatcacttgccaataaaaaagaggaagttttcttttttccaagtttaagcctaacacttgtgtgcgaaccaagtgctacatatgagcttactagttacatccagcctaggtcagggacaaggaagtgatcttcttcatcatcataactgatctcaaacctcggcttcttgttggaaacgttggacgtcatgggtctattgtaggaatgaacatgagaaagctcgggaacttcagctgccggtagagcttcttgatcaggctggtccccaaagaaacccatctctgcaagccagtcaacttcaccaagatctagatgctcctgctgctgaagtagaacaagtgatgcacatattcatgtcaggaataaaacgttttggtacacatagatttggcgaaaccacttctcaccttgttactgcactcaagatcagagtaacggaagaattcatccagtcgatacaggagacggaacagaagactgtaccactttactgcatctagtggagctcagaacctctggtgattagcagagcgagtattaggcgcatgggttgcctcatcgcagtctctgcagagaagagctctgtcttcaacacagaatatgaaagctgccttctcctgcaagtcaacgaagatgaacacaagaaagtgattactacataagcaaaccttaaacatatgtttcttgagatcccgctcaaaaacttttactagagttacatctaagcatcgtataaatatgttaaagaatctgccaagaaaagctcaaaatcacaagatatcctc

SEQ ID NO: 1866 - DNA, 1120 bp, Brassica napus
ctctcccttagttccataacataaacactctccaaaaccacaaatggctacatccgacggcgagaaaagcttgatcgtgagcttcggtgagatgctcatcgactttgtccccaccgtctccggcgtatccctctccgaggctcctggcttcatcaaggctcccggtggtgcgcctgccaacgttgccattgctgtcgcccgtctcggtggccgtgctgcttttgtcggaaagctcggtgacgatgagtttggtcacatgctcgccgggatcttgaaacaaaacggtgtctctgcagaaggaatcaactttgacaccggagctaggacggcgcttgcgttcgtgacgcttagatctgatggagaacgtgagttcatgttttaccggaaccctagcgccgacatgctcctccgtcctgatgagcttaacctcgatctcatcagatctgctaaggtgtttcactatggatcaataagtctcatcgtcgagccatgtagatctgctcacctgaaggccatggaggtggctaaagaagctggtgcgttgctctcttatgacccaaacttgaggctacctttgtggccttccaaggaggaggctaagaagcagattcttagcatctgggacaaagctgaagtgatcaaagtcagcgatgaagagcttatgttcttgactggatctgataacgttgatgatgagactgctctgtctctgtggcatgataacttgaaacttctcttggtcactttgggtgaaaagggttgtaattattacaccaagagcttccgtggatctgttgatcctttccatgtggacgctgtggacacaactggtgctggtgattcatatgttggtgccttgctttgcaacattgttgatgaccgctctgttcttgaggatgaagctcgtcttagagaagtgctcaggtttgcaaatgcatgtggagccattacaacaaccaagaaaggagcaattccagctcttcccacagtgtctgaagttgaaactctcctaaatgcaaagtgatctacaacaagtctggaactttaagatttaacgttttactttcttctgttggctttgtgttttggttctgtgtgttcgttcatagaactgttttga

SEQ ID NO: 1867 - DNA, 2033 bp, Brassica rapa
aaaacatttaatactattaaaaaataaatacgaagtggctagctagcttcttcaccagttaacaagagtctatataaacactcccctcctcgccttcccttccttcattttatattactactctcctcaacagatctgatggcacccaccggcgagaaacccctcatcgtcagcttcggcgagatgctcatcgacttcgtccccaccgagtccggcgtctccctcgccgaagctcctggcttcctcaaagcccccggcggcgcccccgccaacgtcgccatcgccgtctcccgcctcggcggacgatcagccttcgtcggaaagctcggcgacgacgagttcggccacatgctggccgggatcctgcggaaaaacggcgtcgccgatcagggcatcaacttcgataccggagctagaaccgccttggcgttcgtgacgttgaaggccgacggagatcgggagtttatgttttaccggaatcctagcgccgatatgctcctccgtcccgatgagctcgacctcgagctcatcagatccgctaaagtgtttcactatggatcaataagcttaatagtggagccatgtaggtcggctcacttgaaagccatggaagtggcgaaagaagcgggagctcttctttcctacgacccaaacctcagggagcctctgtggccatcgaaggaagaagccaagacacagatcatgagcatctgggacaaggctgagatcatcaaggttagcgacgttgagcttgagtttctaactggaagcaacaagatcgatgatgagaccgcaatgtccttgtggcatcccaacttgaagctcttgcttgttactctcggtgaaaaaggttgccggtattacgccaagaacttccgtggatccgttgaccctttccatgtgaacgctgtggatacaaccggagctggagattcctttgtaggtgccctcctaaacaagattgccgatgatcactccattctcgaggacgaagagagattgcgaaaggtgctaagattcgcaaacgcttgtggagcaatcaccacaacaaaaaaaggagctattccagctcttccttcagaagctgaagttctcagctttcttgaaaagaaatgaaaaaacaaaagtaaagctttctgcacgtaatctgtttccgcttttgtattcttgttggggcactctgctctgtttttgtttctctcttcttcaaatgtaacgatttaaaaagacagtatgtttcaaattcaaggcatcacttgccaataaaaaagaggaagttttcttttttcaagtttaagcctaacacttgtgtgcgaaccaagtgctacatatgagcttactagttacatccagcctaggtcagggacaaggaagtgatcttcttcatcatcataactgatctcaaacctcggcttcttgttggaaacgttggacttcatgggtctattgtaggaatgaacatgagaaagctcgggaacttccactgccagtagagcttcttgatcaggctggtccccaaagaaacccatctctgcaagccagtcaacttcaccaagatctagatgctcctgccgctgaagtagaacaaatgatgcacatattcatgtcaggaataaaacgttttggtacacataaatttggcgaaaccacttctcaccttgttactgcactcaagatcagagtaacggaagaattcatccagtccatacaggagacgaaacagaagactgttccacttctttactgcatctagtggagctcagagcgactctgattccagtggccaagaacctctggttataagcagagcgaatattaggcgcatgggttgcctcatcgtagtctctgcagagaagagctctgtcttcaacacagaatatgaaagctgccttctcctgcaagtcaacgaagatgaacacaagaaagagatcatcactacataagcaaaccttgaacatgtgttccttgagatcccacgcaaaaccttttactaaagttacatctctaagcatcatatatatacaggatgttaa

SEQ ID NO: 1868 - DNA, 998 bp, Brassica rapa
aacttgttccaatggcgtcaaacctagacaaaggcctcatcgtgagcttcggcgagatgctcattgacttcgtccccacgcaatccggcgtttccctcgctgaatcccccggattcctcaaagctcccggaggtgctccggccaacgtcgccatcgcagtcacgcgtctcggtggtcgcgcagctttcgttggaaagctcggtgatgatgagttcggccacatgcttgctggtatcttgagggagaacggtgttgaagacaaggggattaacttcgacaagggagccagaaccgcactagcattcgtcacgttgcgttcagatggggacagagagtttatgttttaccgtaacccgagcgccgacatgcttctccgaccagatgaactcaacctcgaactaatcagatcggccaaagtgtttcactatggatcaataagtttgataacggagccatgcaggtcggctcacttgaaggcaatggaagtggcaaaagaagctggagctcttctttcctacgaccctaacctaagggaacctctttggtcatcccctgaagaagctaggaaacagatcatgagcatctgggacaaggctgagatcatcaaggtcagtgacgtggagcttgagtttcttacccaaaacaaaacgatcgatgatgagtcagcgatgtctctgtggcatcccaatttgaagctcttgcttgttaccctcggtgaaaagggatgtcgttactacactaagggtttccatggatctgttgaggcttttgatgtgaacgcggtagatactaccggagctggagattcattcatcggcgcgtttctaagccagattgttgatgatcagactgtactcaaggaggaagaaaggttgagaaaagtgctgaggttcgcaaacgcttgtggagccatcacgacgaccaagaagggagccattccagctcttccttctgagtgtgatgctctctctcttcttaaagacaaatagagagaccta

SEQ ID NO: 1869 - DNA, 1195 bp, Brassica napus
ctcccaggtccctgcagtccggtccggattctgggtcgaccggacgcgtccgatctttgatctctcaataatcatcccaacagatctgatggcacccaccggcgagaaacccctcatcgtcagcttcggcgagatgctcatcgacttcgtccccaccgagtccggcgtctccctcgccgaagccccgggcttcctcaaagcccccggcggcgctcccgccaacgtcgccatcgccgtctcccgcctcggcggacgatccgcgttcgtcggaaagctcggcgacgacgagttcggccacatgctggccgggatcctgaggaaaaacggcgtcgccgatcagggcatcaacttcgataccggagctagaaccgccttggcgttcgtgacgttgaaggccgacggagatcgggagtttatgttttaccggaatcctagcgccgatatgctcctccgtcccgatgagctcgacctcgagctcatcagatccgctaaagtgtttcactatggatcaataagcttaatagtggagccatgtagatcggctcacttgaaagccatggaagtggcgaaagaagcgggagctcttctttcctacgacccaaacctcagggagcctctgtggccatcgaaggaagaagccaagacacagatcatgagcatctgggacaaggctgagatcatcaaggttagcgacgttgagcttgagtttctaactggaagcaacaagatcgatgatgagaccgcaatgtccttgtggcatcccaacttgaagcttttgcttgtcactctcggtgaaaagggttgccggtattacgccaagaacttccgtggatccgttgaccctttccatgtgaacgctgtggatacaaccggagctggagattcctttgtaggtgccctcctaaacaagattgccgatgatcactccattctcgaggacgaagagagattgcgaaaggtgctaagattcgcaaacgcttgtggagcaatcaccacaacaaaaaaaggagctattccagctcttccttcagaagctgaagttctcagctttcttgaaaagaaatgaaaaaacaaaagtaaagctttctgcacgtaatctgtttccgcttttgtattcttgttggggcactctgctctgtttttgtttctctcttcttcaaatgtaacgatttaaaaagacagtatgtttcaaatt

SEQ ID NO: 1870 - DNA, 1140 bp, Brassica napus
acagatctgatggcacccaccggcgagaaaccactcatcgtcagcttcggcgagatgctcatcgacttcgtccccaccgagtccggcgtctccctcgccgaagccccgggcttcctcaaagcccccggcggcgctcccgccaacgtcgccatcgccgtctcccgcctcggcggacgatccgcgttcgtcggaaagctcggcgacgacgagttcggccacatgctggccgggatcctgaggaaaaacggcgtcgccgatcagggcatcaacttcgatacgggagcaaggaccgccttggcgttcgtgacgttgaaggccgacggagatcgggagtttatgttttaccggaatcccagcgccgatatgcttctccgtcccgatgagctcgacctcgagctcatcagatccgctaaagtgtttcactatggatcaataagcttaatagtggagccatgtaggtcggctcacttgaaggcaatggaagtggcgaaagaagccggagctcttctttcctacgacccaaacctcagggagcctctgtggccatcaaaggaagaagccaagacacagatcatgagcatctgggacaaggctgagatcatcaaggttagcgacgttgagcttgagtttctaactggaagcaacaagatcgatgatgagaccgcaatgtccttgtggcatcccaacttgaagctcttgcttgtcactctcggtgaaaagggttgccggtattacgccaagaacttccgtggatccgttgaccctttccatgtgaacgctgtggatacaaccggagctggagattcctttgttggtgccctcctaaacaagattgcagatgatcactccattctcgaggacgaagagagattgagaaaggtgctaagattcgcaaacgcttgtggagcaatcaccacaaccaagaaaggagctattccagctcttccttcagaagctgaagttctcagctttcttgaaaagaaatgaaaaaacaaaagtaaagctttctgcacgtaatctgtttccgcttttgtattcttgtttaaacaagttggggcactctgctctgtttttgtttctctcttcttcaaatgtaacgatttaaaaagacagtatgtttcaaattcaaggcatcacttg

SEQ ID NO: 1871 - DNA, 1073 bp, Centaurea maculosa
ctccttcttctactcttcaatttcttgctaattttttttgctttttttctcgatcggagatggcggccaccaatggagtcgtgaaggaggaaggcggattgatcgtcagcttcggcgagatgctgatcgacttcgttccgacggtctccggcgtatcgctggcggaggcgccgggattcctgaaggctccgggcggcgctccggcgaacatcgcgatcgccgtctcgaggctcggcgggaagtcggcgttcgtcggaaagctcggagacgacgagttcggacacatgctcgccgggatcttgaaggagaacggcgtcaacggcgacggaatcaacttcgacaaaggcgcacggacggcgctcgcattcgtcacgctgaaagccgacggcgatcgcgagtttatgttctaccggaaccctagcgccgatatgttattgactccagatgaactcaacctcgagctcattagatctgccaaagttttccattatgggtcaataagcttgatagttgagccctgcagatcagcacatcttaaagcaatggaagttgcaaaagatgcaggggctcttctatcttacgaccctaacctgcggttgccgttgtggccgtcacccgaggaggcccgtgaccagatcatgagcatatgggacaaggccgaggtgatcaaagtgagcgataacgagctcgagtttctcacgggatgtgaaacggttaacgatgaggctgcaatgtctttgtggcaccctaatttgaagcttctgttggtcactcttggtgacaagggttgcaattactacaccaagaatttccatggaacggtgggtgctttcgcagtgaaagccgtggacacaactggtgcgggtgactcctttgtcggggccctcctaaccaagatcgttgatgaccattccgtgctagaggatgaaccgaagttgaaagaacttctgagatacgcatgtgcttgtggagcgatcacgaccaccaaaaagggcgcgattccagcccttcctaccgtgtccgaggtccaaggctttatcaaggaacattgttaaggaaaaaaagtttgtcgt

SEQ ID NO: 1872 - DNA, 1220 bp, Cucumis sativus
atcactctcactcgcatcccatggcttccaccaacggcgctatgccttccggctccggtttgatcctcagtttcggcgagatgttgatcgatttcgtccccacagtttccggcgtctctctagccgaggcaccaggattcctcaaggctcccggtggcgctccagccaacgtcgcgatcgccgtcagccgactcggcggacgtgctgccttcgttggaaagctcggcgaagatgagtttgggcgtatgttggaaggaatagttaaggagaacggcgttgacgcttctggaatccgcttcgatcaaggcgctagaaccgccttggctttcgtcactttacgcgccgacggtgagcgtgagttcatgttctaccggaaccctagcgccgatatgcttctgaagccggaggaattggatctcgatctcatcagatccgccaaaatctttcactatggatcaataagtttgatcgtggagccctgcagatcggcacacataaaagcaatggatgaggctaagaaagcaggtgttctactttcatatgacccaaatttgaggctgcctttgtggccctctgcaaatgaggctcgtgaacagatcaagagcatttggaacaaggccgacattatcaaggtcagtgatgaggagctcaaattcctcacccagaaagaaaaggtcgatgatgaaaacgctatgtctctctggcacgatggcttgaagctcctcctcgtcactcttggcgagcaaggctgcagatactacaccaagaacttccgtggctctgttgatccattcaaggttaaggctgtggacacaaccggagccggggactcattcgttggtgctcttcttaccaagatcgtggacgaccaatcagtgcttcaggatgagaagaagctgagggatatcttgaggtttgcaaatgcttgtggagccattacaacaaccaagaaaggagcaattccagctcttccatcagaggctgatgtggctgcactgatcaaggcttcttcttagacaacactgcatagagagagattccccctcttttttttttttcttttttttctttctcttgtttagatttttggtctttaattcgcttttctcaattgaatttaaagagaagggtttgtgaaggtcgtttttcaattttcctctttttagactccttgagcttaacgtatttttcttaataaaagcttctctacattttgatta

SEQ ID NO: 1873 - DNA, 1329 bp, Cynara scolymus
tatattggctttattatacccccccacccccaatgctcctatctctccctctcgtcctcttcatttcttgctaattttgctttctgactcggagatatggccgccaccaatggagtcgtgaaagcggaggggggattgatcgtcagtttcggtgagatgttgatagacttcgttccgaccgtctccggcctatcgctggctgaggcgcccggatttttgaaggcaccaggtggtgctccggcaaacgtcgcgatcgcggtctcaaggctcggtggaaagtcggctttcgttggtaagctaggagacgatgagtttggacacatgctcgccgggatcttgaaggagaacggcgcctgcggcgaaggaatcaacttcgataaaggagcacggactgctctggcatttgttaccctgaaagccgacggcgatcgcgagtttatgttctaccggaaccctagcgcagatatgttattgactcccgatgaactcaaccttgagctcattagatctgccaaagttttccattatgggtcaataagcttgatagtggagccctgcagatcagcacatcttaaagcgatggaagttgcaaaagatgcaggggctcttctctcctacgaccctaatctgcggttgccattgtggccgtcaccggaggaggcgcgtgagcagatcatgagcatatgggacaaggccgaagtgatcaaggtgagcgataatgagctcgaatttctcacaggatgtgaaaagattgatgatgaggctgcaatgtctttgtggcaccctaatttgaagcttctgttggtcactcttggtgacaagggttgcaattactacaccaagaattttcatggaacggtgggagctttcgcagtgaaagccgtggacacgactggtgcgggtgactcctttgttggtgccctcctgaccaagatcgtcgatgaccattccgtgctagaggatgaaggcaagttgaaagaactgctgagatacgcgtgtgcttgtggagcgatcacgaccaccaaaaagggtgcgattccggcccttcctaccgtgtcagaggtccaaggctttatcaaggaacattgttaaggaaaaagaaatccattgtcgtcctcttcattgaaaaataaatttgtccgaaatggttttgtattatcaccaatcaaatgattaaatgaaaaaaaacaacgaaatcgtgtcatgtcgattagcgaaagcccgggattttgtaactcaagagtgtgggttcaccttttggtttgtatgtgtagactttagattgcttgtttcgtgttttgcaagcctttgaattaaatctaaatttcc

SEQ ID NO: 1874 - DNA, 1165 bp, Taraxacum officinale
cggtccggattccgggatatttcttgctcatcaaaaatgtccgccaacaatggagtcgctaaggagggaggattgatcgtcagcttcggtgagatgctgatcgactttgtgccgaccgtatccggcgtgtcgctggcagaggcgccgggatttttgaaggcaccaggtggtgctccggccaacgtcgcgatcgcggtgcaaaggctcggcggaaagtcggctttcgttggtaagttaggagatgacgagttcggacacatgctcgccgggatcttgaaggagaacggtgtctccgtcgaaggaatcaacttcgataaaggagcacgtactgctctggcatttgttacactgaaagccgacggcgatcgcgagtttatgttctaccggaaccctagcgcagatatgttattgactcccgatgaactcaaccttgagctcattagatctgcgaaagtattccactacgggtcaataagtttgatagtggagccatgcagatcagcacacctgaaagcaatggaggtggcaaaagacgcaggggcacttttgtcatatgacccaaacctccggctgccactctggccgtcgccggaggaggcacgtgagcaaatcatgagcatatgggacaaagcccaagtcattaaagtcagcgataacgaacttgaatttctcaccggaagtaacaaaatcgacgatgaagccgccatgtctttatggcaccctcatttgaagcttttattggtcactcttggtgacaaaggttgcaattactacaccaagcattttcacggaacggtgggtgcgtttcccgttaaagcagttgacacaacgggtgctggtgactcttttgttggtgcccttttgactaagatcgttgacgaccaatcagtgcttgaggacgaagtgaaattgaaagaaatactgagatactcgtgtgcttgtggggccataactacgaccaaaaagggggcgattccggctcttccttctgtatcggaagttcaaacctttctgaatgcgggtcatcattagggaaaactttgtttggctattgttttttggtgttgtttcttgacggaataataatggttttgtattgttcttcatcagggtttaattgaaactagtgatggaataggataggcaaaaccatgggattttgtga

SEQ ID NO: 1875 - DNA, 1401 bp, Lactuca sativa
aaaaaataaaaataaaaactttgaaggtttggaggggcggggggatgaatattggcctatatataccccacccccaaaactcttctcttcctctctttcctcttcaatttcttgctcaatcaaaaatggcagccaacaatggagtcgctaaggagggaggattgatcgtcagcttcggcgagatgctgatcgactttgtaccgacagtttccggcgtatcgctggcggaggcgccgggatttttgaaggcaccaggtggtgctccggcaaacgtcgcgatcgcggtgtcacggctcggcggaaagtcggctttcgtcggtaagttaggagacgatgagttcggacacatgctcgccgggatcttgaaggagaacggcgtctccggcgaaggaatcaacttcgataaaggagcacgtactgctctcgcatttgttacactaaaagccgacggcgatcgcgagttcatgttctaccgaaaccctagcgccgacatgttattgactcccgatgaactcaaccttgagctcattagatctgcgaaggttttccactacgggtcaataagtttgatagtggagccatgcagatcagcgcatctgaaagcaatggaggtggcgaaagacgcaggggcacttttgtcatatgacccaaatctccggctgccactgtggccatcgccggaggaggcgcgtgagcaaatcatgagcatttgggataaggcggaagtcattaaagtcagtgataatgaacttgaatttctcactggaaataacaaaattgatgatgaatgtgctatgtctttatggcaccctaatttgaagcttttattggtcactcttggtgacaaaggttgcaattactacaccaagcattttcatggaacaattggtgcgttcgctgttaaagccgttgacacaacgggtgcgggtgactcctttgttggcgcacttttgactaagcttgttgatgatcattccgtgctagaggatgaaggaaagttaagagagttgttgagattttcgtgtgcttgcggagctatcaccaccaccaaaaagggggcgattccggcccttccttctgtatcggaagttcatacctttttggatgcttctcacaattagggaaaactttgtttgtctattgtttttggtcttttctttcttgatcgaataataatggttttgtgttatcatccatcggtgtttaaaaaaaacaaaagatgaaatcgagtggcaaaactagggattttgtgattgaattgacgagatttatatgtttagattgcttcttgttttgttttgttttgtgttctagaaaaaggtttgatttaaatactaaatttccaatttattgcttcaatcaacttggtagatatattataaaaaaaatgctcgtaaaaag

SEQ ID NO: 1876 - DNA, 1529 bp, Mimulus guttatus
atgacaaccaataattaaataaattaattaagttaatccatgtgttgaataattaaataaattcattttgccccactctaattctctacttacccacccacaccaacgacccggacccggatcccgacccgacccgactcaccgctctatataaataactcacccttcttcatttgcgctactcatctctatctgcgcaaaatacccgtgcatacacacagttgtacgtatttacttattccacgtcatcaatggcgaaatccaacggcctgatcgtgagtttcggcgagatgctgatcgatttcgtgccgacggtctccggcgtgtcgctggcggaggcgccggggtttctgaaggcacccggcggcgctccggcgaacgtggccatcgccgtcgccaggctcggcgggaaggccgcttttctcgggaagctcggtgacgacgagttcgggcacatgctcgccggaatcctgaaggagaacggcgtctccgccgacggcgtgagattcgacaagggcgcacgcaccgccctggcgttcgtgaccctacgcgccgacggagagcgtgagtttatgttctacaggaaccccagcgctgacatgctgctcactcccgatgagttgaatctcgatctcattaaatctgcgaaagtgttccattacggatcgataagcttgatagtggagccatgcagatcggcgcatataaaagcaatggaggtggcaaagagtgcgggtgcattgctctcgtacgacccgaacctaaggctgcccctttggccttcggcggaatatgctaaagagcaaataatgagcatttggaataaagcggatgtgattaaagttagcgatgtcgaactcgaattcctcaccggaagcaataagatcgacgatgaatctgcaatgtctttgtggcatgataacttgaagctgcttttggtcacacttggagaaaagggttgcagatattacactaagcaattccgtggatcggtggatgcatatcatgtgaaagcagtagatacaactggagctggtgattcttttgtgggtgcccttcttggaaagattgttgatgatcatgccattatccaggacgaggcaaaattgaaggaagtgttgaaatattcatgtgcatgtggagcaataacaacaactaagaagggtgcaattccagctcttccaacccattctgaggttctttctgttcttaatggacccaaatagagggaataaaaactcttgtttgaattttctcctctttttttttttcgtatctcgagttttttagtcgagttttttataaaacaaaaacaagttttcgctttgcaagttgttctagaatttagggtttttactatcttgattttacaagtacttgtaacgctgaaacaattttcactttaattgtgattacggaataaaaatttagcgcgttgtattccatttttttcttcagatgattatattgttcttgtaggcgtttggttgagaatgtttatatgattgatacagttcgaactagcaaaa

SEQ ID NO: 1877 - DNA, 1381 bp, Quercus alba
gatatttttccttcactttctctctctaaaaaaaagtctctcagcgatggctcccaatggcgttattgaaaagaccggagccggcttgatcgtctcgttcggcgagatgctcatcgacttcgtcccgaccgtgtccggcgtgtcgctcgccgaggctccgggattcctcaaggctcccggcggcgctccggccaacgtggcgatcgccgtctcgaggctcggcgggaaagcggcgttcgtcgggaaactcggcgacgacgagttcgggcacatgctggccggaattctgagggaaaacggcgtcgtcgacgaagggatcaacttcgacaagggcgcgcgcacggcgctcgcgttcgtgactctacgcgccgacggagagcgcgagttcatgttttacagaaaccctagcgccgatatgctcctcactcccgacgaactcaatcttgatctcattcgatccgccaaagtttttcactatggatccataagcttgattgtggagccatgcagaacagcacacctaaaggcaatggaggtggccaaagatgctggtgtcctgctctcctatgaccccaacctccggctaccactgtggccatcgccagaggaggcccgtgtgcagattaagagcatttgggataaggctgatttgatcaaagttagtgatgtggagcttgagttcctcacagggagtaataagattgatgacgaatctgcaatgtcactgtggcaccccaacttgaagctcctccttgtcactcttggtgacttgggctgcagatactataccaagaacttccatggagaggtagaggctttccgtgtcaacacagtggatacaactggtgctggagattcatttgttggtgccctactctgcaagatcgttgatgaccaatccatactagaagatgaaccaagattgagggccgttctcaaatttgcaaatgcatgtggagccattacaactaccaaaaagggagcaatccctgcccttccaaccgagtctgatgccctcagcctgattaagcttaaaagacttggttgtgcttcattgttccaaccacttttttctttggagcacttttttttttttaatgcttttgtaatttttgcataggatttgcttttttcagttcaactaaaaagggtttgaagtttgaacccgctcatttttactcctttttccctgcctgtaatgatgggaaggcttgtgtttcgaggcattaataataaacctttttttaaagttttctcttttgctagtcttctttgcattgttttattagtttattcatccaaaagatgggatcaagagcgtggttgacatgccagtcattgcaaatggcttattttctatggactttctaagcaacttgtt

SEQ ID NO: 1878 - DNA, 1072 bp, Plantago ovata
acattacattacatacacaatttctgtacgtatcatcaacagacaaatcaaatggcgcaatcatcatcttcaaccagcggattgatcgtctgcttcggcgagatgctgatcgacttcgtcccgactgtatctggcgtatctctcgccgaggcccctgccttcatcaaatctcccggtggcgctccggccaacgccgcgatcgccgtctctcgcctcggcggaaagtctgccttcgtcggaaagctcggcgacgacgagttcggccgcatgctcgaggggattttggtcgagaacggcgtctcctccgccggagtgaacttcgataagggagctaggactgccttggcgttcgtgactctacgcgccgatggagagcgtgagtttatgttttataggaatccgagtgctgacatgttgctgacgcctgatgagctcaatcttgacctcattagatcttccaaagtgttccattacggatcaataagcttgatagtggagccatgtagatcagcgcatttgaaggcaatggaggtggcaaaggaggctggagcattgctctcttatgatccgaatctaaggcttccactctggccctcggctgaggaggctaagaagcaaatattgagcatctggaataaggctgatgtgatcaaggtgagtgataacgagcttgagttcctcactggaagcgataagattgatgatgaatcggccatgactttgtggcatgacaagttgaagcttcttttagtcacacttggggaaaagggatgcagatattacaccaagaacttccgtggacaaatagatgggtttcacgtaaagacagtggacacaactggtgcgggtgattcctttgttggagctctgctatgcaagattgtggatgaccattccatcattcaggatgagccaaggttgaaggaagtgctaaaatacgcgtgtgcttgcggagccatcaccaccacaaagaagggagcaattccagctcttcctagtcactctgaagtccttactcttcttggagcttgaatttttttcttccttgatctgttttccagtgaacaaaaat

SEQ ID NO: 1879 - DNA, 1205 bp, Triphysaria pusilla
atattcttcatattctctccctattcaaaattcagtaaccttcaaatatggcagccaacaatagcaatctcaataatggtctaatcgtaagtttcggcgagatgttaatcgatttcgtcccaacagtctccggcgtatctctagctggcgcgcctggattcatcaaagcacccggcggcgctccggccaatgtcgccatagctgtggccaggctcggcgggaacgcggcgtttgtcggcaagctcggcgacgatgagtttgggcatatgctcgccgcgattctgaaggagaacggcgtctccgccgagggagttaactttgacgagggcgcgcggacggcgctggcgtttgtgaccctacgagacgacggcgaacgcgagttcatgttttataggaatcctagcgctgatatgcttctcacgccggaggagctgaatctcgatctgattagatctgctaagattttccactatggatcgataagcttgatcgtcgacccatgtcgatcggcccatctaaaagcaatggacgaggccaagtcggcaggggcattgttgtcatacgacccaaacctccgactgccactctggccttcggccgagtatgctaaggagcagatcatgagcatttgggaaaaggctgacatcatcaaggtcagtgatgtggagctcgagtttctgaccggtagcgacaagatcgacgatgagtctgctatgtccttgtggcaccctaatctgcagctgcttttggtcactcttggtgaaaagggctgcagatattaccacaagaatttccgtggatctatcgatgggtaccgtgtagagacaatagacacaactggagcaggtgactcatttgtgggagcccttcttggaaagattgttgatgaccaagctattatccatgatgaggtgaggttgaaggaagtgttgaaatatgcatgtgcttgtggagctattaccacaactaagaagggtgcaattccagctttacctgaacattctgaagctcttgctattctcaacggggcaaagtagaggaaaaattcaaggaaaaaagcatttgtttataatatcttattcaattttttattctagtttttgcgttgcaaattagtatctcagctttaaggttgacatttattttcgtatagttgtaatgttgacataataagttcattatttataaataaattcatttttatt

SEQ ID NO: 1880 - DNA, 1503 bp, Brassica oleracea
catatagaaacgttgaatccactgaaccatgaaagcaattatagaaaacaatgaaaagaaaattaaaataattcattgcataattgctaagaaattttaaattcatgatatagtatatccgtcatatctataaacttatatatattcaacgtttcaaagatatgtctacaagaatctgactgtttacgattatcattttattcatttctttttttgaacatattctttaccagagtgaaaccatgacttcaaaagctttaaaccatgtcttacacccttatataaactacactaaccttcgttcacttatcctcatctctattgtcttccttctcagatctctcgaacacaaactagaacttgttccaatggcgtcaaacctagacaaaggcctcatcgtgagcttcggcgagatgctcattgacttcgtccccacgcaatccggcgtttccctcgctgaatcccccggattcctcaaagctcccggaggtgctccggccaacgtcgccatcgcagtcacgcgtctcggtggtcgcgcagctttcgttggaaagctcggtgatgatgagttcggccacatgcttgctggtatcttgagggagaacggtgttgaagacaaggggattaacttcgacaagggagccagaaccgcactagcattcgtcacgttgcgttcagatggggacagagagtttatgttttaccgtaacccgagcgccgacatgcttctccgaccagatgaactcaacctcgaactaatcagatcggccaaagtgtttcactatggatcaataagtttgataacggagccatgcaggtcggctcacttgaaggcaatggaagtggcaaaagaagctggagctcttctttcctacgaccctaacctaagggaacctctttggtcatcccctgaagaagctaggaaacagatcatgagcatctgggacaaggctgagatcatcaaggtcagtgacgtggagcttgagtttcttacccaaaacaaaacgatcgatgatgagtcagcgatgtctctgtggcatcccaatttgaagctcttgcttgttaccctcggtgaaaagggatgtcgttactacactaagggtttccatggatctgttgaggcttttgatgtgaacgcggtagatactaccggagctggagattcattcatcggcgcgtttctaagccagattgttgatgatcagactgtactcaaggaggaagaaaggttgagaaaagtgctgaggttcgcaaacgcttgtggagccatcacgacgaccaagaagggagccattccagctcttccttctgagtgtgatgctctctctcttcttaaagacaaatagagagacctagtaacaacaaccttttaaatttacaaatgtgcgctttgtcttgctgatgtattttgtttgaaataataaggatcgcaatgttgttatcttttctatttatatctttctgagcatctcttgctagtaataaaaaaaatcagagtttttt

SEQ ID NO: 1881 - DNA, 1259 bp, Mimulus guttatus
aacacacaaacacacacacacacacaatatatatatatctatatactctcgattacgataacaatggcggcgaccaataacagcggttctagtagcggtctgatcgtcagcttcggtgagatgctgatcgatttcgtgccgacggtctccggcgtgtctctggcggaggcgcctggatttctcaaggctcccggcggcgcgccggcgaacgtcgccatagcggtggcgaggctgggcgggaacgccgcgttcgtcggcaagctcggcgacgacgagttcggccagatgctcgccggaatcctgaaggagaacggcgtctccgccgagggcgtgaatttcgacaccggcgcgaggacggcgctggcgttcgtaaccctacgcgccgacggcgagcgtgagttcatgttctacaggaaccccagcgccgacatgctgctcacccccgatgagttgaatctcgatctcatcagatctgcgaaagtgttccactacggatcgataagcttgatcgtggagccatgtcgatcagctcatctgaaagcaatggaagtggcaaaggccgccggcgcacttctctcgtacgacccgaacctccgcctgccgctttggtcctccgcggaggaggctcgccgccagatcatgagcatttgggatcaggctgaggtcatcaaagttagcgacgaagagctccaattcctcaccgaaaacgataaggtcgacgacgaatccgcaatgtctctatggcacgacaacttgaagcttctcttggtcacactcggagacaagggttgcagatactataccaagaattttcgtggggaggtggatgcgtatcgtgtgaagacggtggatacaactggagcgggggattctttcgtcggagcgcttttgtacaagatggttgacgaccagacgataatcgaggatgagttgaggttgaaggaagtgcttaaatatgcatgtgcttgtggagctatcactactactaagaagggagcaattccagctctacctactccttctcaagtactcactcttctcaacgggactgaaaccatgtaaaagagaacaaacggctttcttagtagtttaatgtttttccttagatttttttttttagcttttggtaatgcataggtgtttttcaatttctgaaactttgtgttttacaattttaattttttcaaagttgtttgacatttatttggagaagtttctttacaaagaaatttgatattgtcgtcgtttaatagatgcta

SEQ ID NO: 1882 - DNA, 1195 bp, Mimulus guttatus
tctttcaacacacgcatatacacacacatatacgtatatactttcgaattacgatagcaatggcggctaccaataacagcggttccagtaacggtctgatcgtcagcttcggcgagatgctgatcgatttcgtgcccacggtttccggcgtgtctctggcggaggcgcctggatttatcaaggctccaggcggcgcgccggccaatgttgccatagcggtgacgaggttgggcggaaacgccgcgttcgtcggcaagctaggcgacgacgagttcggccagatgctcgcgggaatcctgagggagaacggcgtttcagccgacggcgtgaatttcgacaaggacgcgaggacggcgctggcgttcgtcaccctacgcgccgacggagagcgtgagttcatgttctacaggaatccgagtgctgatatgctgctcacccccgacgagttgaatctcgatctcatcagatctgcaaaagtgttccattatggatcaataagcttgatagtggagccatgtagatcagcccatctgaaagcaatggaggtggcaaaagccgccggagcactcctctcgtatgacccaaacctccgcctgccgctctggtcctccgccgaggaagctcgtaaacagattttgagcatatggaatcaggctgaggtcatcaaagtcagcgacgaagaactccaattcctcacccaaaacgacaatatcgacgatgaatccgcaatgtctctgtggcacgacaatctgaagctcctcctagttacccttggggacaagggttgcagatactacaccaagaacttccgtggagctgtggatgcgtaccgtgtgaagacagtggatacaactggagctggagattctttcgttggagcactcctgtataagattgtcgatgaccaagcgataatcgaggatgaatcgagattgaaggaagtgcttaaatatgcatgtgcctgtggagctatcaccactactaagaagggtgcaatcccagctcttcctactccgtctcaagtcctcaccgttctcaatgggactgcgaccgagtaaacgcgcgcgccgttcttagtatagctttccttagtttctttaggttaaatttacactgttttttcaattttctttaggtttttagaattttactttttttgcagagttaatgaaaatttctttggagttctaatcat

SEQ ID NO: 1883 - DNA, 1334 bp, Eschscholzia californica
ccacgcgtccgcaaccataaataaaacaccccctgcccatctctataaaattcacttcaaaacctttcaaacctctctctctttctccaatctcacacatacccatctctctaaatcactttctctctcttctttctcactctagaatcaactaaaccttaattagatcactacccatggcatcaaataaccatgaaaataaaggggagatcatagtaagttttggagagatgttaatagattttgtaccaacagtatcaggagtatcactatcagaagcaccaggattcttgaaagcaccaggaggggcaccagctaatgttgctattgctattactagacttggtggtaaatcggcttttgttggtaaacttggtgatgatgaatttggtcatatgttagctggtattttgaaaagcaacggtgttattagtgacggtattttattcgatcaaggtgctcgtaccgctcttgctttcgttacgttacgatccgatggtgaacgtgaattcatgttttatagaaaccctagtgctgatatgctcttgagagaagatgaacttaatcttgaactcattagaaaggctaaagtgtttcattatggatcaataagtttgattactgagccatgtagatcagctcacttaaaagcaatggaggttgctaaggatgcaggggcaatattgtcttatgatcctaatctccgattaccgttatggtcatcagccgatgaggcccgagaacagatcctgagcatctgggacaaggccgatctgatcaaggtcagcgatgtcgagttcgagttcttgaccggaaaagatgtcgtcgatgacgaaacagcaatatcattgatgcatccttcattgaagttgttcttggttacccttggggagaaaggatgcagatactataccaagcattttagaggaacagtggaagcattcacagtgaagacagtagatacaacaggtgctggtgatgcctttgttggtgctttactctgcaaaattgttgaagatgaatccattcttgaagatgaatcaaagttgaagaaagtattgagatttgcaaatgcatgtggagcaataacaacaaccaagaagggagcaattcctgcccttcctaatgaagaagaagtactcaagcttgttaatggagcttaattatttacctttcttcttttttctagttgatttttttttgtttggggttttcatggaaatctaggagaggaacttagagtgagttttatgttttttaatttcaatcaagttttcactctttttttttcacttatgatggaaactatttgggttcatttgaccctgcttttt

SEQ ID NO: 1884 - DNA, 1372 bp, Primula obconica
catcatctctccaactatttctatttaatttaattactaaccaaagaaaaaaaaatagggttctacaaacaatgggttaatagtgagcttcggcgagatgctaatcgacttcgtcccgaccgtgtcgggcgtgtcgctagccgaggctcctggcttcctgaaggcaccaggtggcgcgcccgccaacgtggcaatcgcggtagcgaggctcggcggacgcgccgcctttgttggaaaactcggagacgacgagtttggtcacatgctcaaaggtatattgaaggagaacggagtaagcgttgatgggatattatttgatcaaggggcgaggactgcgttggcgtttgtgacactacgcgccgatggggagcgtgagtttatgttttataggaatcccagtgctgatatgttgcttaggcccaatgagcttaatcttgaccagatcagatctgcgaaaatattccactatgggtcaataagcttgatagtggagccatgtcgatcggcccacataaaggcgatggaggtggcaaaggcaggtggggcattgctctcttacgaccctaaccttcgtttgccactgtggccctcagctgaggaagcacgcaagcagattctgagtatttgggacaaggctgagatcatcaaggtcagtgacaacgagctcgagttcctcactggtagtgacaagatcgatgatgagtcagcgttgtcgttgtggcactcgaatttgaagcttttgctggtgactcttggcgagaaagggtgcaagtattacaccaagagcttccgtgggactgtcgatgggtttcatgttaaagctgtggatacgactggggctggtgactcgtttgttggtgctctgctttgcaagatagtagatgaccgagctgttctcgagaatgaagcaaagttgagggatgtgcttaagtttgcgaatgcttgtggagccatcaccaccacaaagaaaggagccatccctgccttgcctactgaagtcgacgttctgactctcatgcaaggaaattaaatgttttgaactttagattatcaaatcatgttttttttcttcaagttttgaactcagttcagtagattagtgatggtttttgggtgttttttttgatcaatttcagtgctgaaaaaataataactgcttctttcattgataagaaatgtttttcaattgttgataaattcctgtattaaaaattctacctttaaaaaaaaaaaaaagaaataacaattagtatgaagttagtttctaagtaatacaagacgatgaagactattagtaaactagtactaaaacaaaccttgtcacctagaaaggaaaaggaagttagtcgtggttaaggggtaagtttactta

SEQ ID NO: 1885 - DNA, 1178 bp, Arabidopsis thaliana
tctctggaacacaaaatcgatcttgttcaaatgacgtcatccaacggcgataataaaggtctcgtcgttagcttcggcgagatgctcattgacttcgtgcccacggaatccggcgtctccctctctgaatcctctggatttctcaaagctcctggtggtgctccagcaaacgtcgctatcgctgtttcccgtctcggaggtcgcgccgccttcgtcggaaaactcggggacgatgagtttggccatatgcttgccggaatcttgagaaagaacgatgtcgacgatcaggggatcaatttcgataaaggagcaagaaccgcactcgcttttgtgactctgcgttctgacggagaacgagagtttatgttttaccggaatcccagcgccgatatgcttctccggccagatgaactcaacctcgaactaatcagatccgcgaaagtgtttcactatggatcaataagtttgattacagagccatgtagatcagctcacatgaaggcgatggaggtggcgaaagaagctggagctcttctttcctacgatccaaacctcagggaacctctgtggccatcccctgaagaagctaggaaacagatcatgagtatctgggacaaggctgacattattaaggtcagtgacgtcgagcttgagttcttgacaggaaacaaaacgattgatgatgagacagctatgtctctgtggcatcctaatttgaagctcttgcttgttacacttggcgaaaatggatgtcgttactacactaaggatttccatggatctgttgaaactttccatgttgacgctgtggatactactggagctggtgattcttttgttggcgcgcttctaaaccagattgttgatgatcaatctgtactcgaggaggaagagagattgagaaaagtgctgagatttgcaaacgcttgtggagcaatcacgacgactaaaaagggagccattccagctcttcctacagattgtgaagctctcagttttcttaagatacaagtagaatagtaaaacttctcttcgagtccagaattctccttgtctattgtaataatctgttctggattcttcctgatgattctgatcatttgtaatgttttttttttttggttctctctctgtcttttctttttcttcttcattgtattgaataaaacagacttgtg

SEQ ID NO: 1886 - DNA, 1518 bp, Petroselinum crispum
aaataaataaatactcctaataatatccaagttcatatggatattacatttatcgggttattatcgaaaaatacgggaagtaagtagtagtaggagcttaaaagattagagtaggaaaagggggtaaaagaaatcagagggtggggatattattgactcctttcttttctctaaagtaattatctatccaatatcaattttggggggggggggggggggggggggggggggggggggggggggggggggggggggggggggggggggggggggggggggggggggggggggggggggggggggggggggctctctctctccaaacttttttgtgtgaatacctctctctatacaaaacaaacactagtaggctagtgatgggtagcaaaggaggtgatctgatcgttagcttcggggagatgctgatcgacttcgtgccgacagaatcgggcgtgtctctggcggaagcacctggattcctcaaagctccgggaggcgcaccggccaacgtggcgatcgcggttactagactgggaggaaaggctgccttcctcggcaaactgggagacgatgagttcggtcacatgcttgccggaatactcaagcagaatggagtcagtgttgaaggtatcaagtttgatcaaggcgccagaacagcgttggctttcgtcaccctacgcgccgatggagagcgtgagtttatgttttacaggaatccaagtgctgatatgttgttgactcctgatgagttgaatctcgacctcattagatctgctaaagtttttcattatgggtccataagtttgattgtggagccatgcagatcagcgcatttgaaggcaatggaggtggcaaaggaagccggttgcttactttcttatgacccaaaccttcgcctaccactgtggccatcagctaaggaggcacgcgagaagataatgagcatatgggataaggctgatgtcatcaaggtcagcgacaacgagttggaatttctcacgggaaaggaggtcagcgacgaggcagcattgtccttgtggcatcctaatttgaagcttctcctggtcacccttggagaagacggctgcaagtactattccaagagtttccaaggaaaaattgccggttttcatgtcaaaactattgatacaactggtgcgggagactcttttatcggtgcccttttatgtaagatggttcaggatcaatctataattacggatgaagcaaagctgaaggaagttcttaaatttgcatgtgcatgtggagccataacaaccaccaagaaaggagcaatcccagccctgcccacagaatctgaagcccagacacttctcaagagcaattagattgattaactaagacccactctttgtgatttcactttttcatctacccctttattcctgtttaagctactactttttatattattagttgttgctaggttttatgaaagttttgtttggaatccaaataaagtgggggttaccaatctcttagatcttagactttttt

SEQ ID NO: 1887 - DNA, 999 bp, Platanus occidentalis
gagtcgaaagcgacatccgatgggctcatcgtgagcttcggcgagatgcttattgactttgtgccaacagtttccggcgtctctctcgcagaagcaccgggattcttgaaggcccccggtggtgctccggccaacgtggctatagccgtttcccggcttggaggtaaatcggccttcgtgggaagctgggagacgatgagttcggtcacatgttagccggtatcctgaaagaaacggcgtgatcggcgatgggatcttgttcgatgaaggtgctcgtaccgctttagctttcgtgaccctaagatccgacggcgaacgcgaattcatgttctatcgtaacccaagtgccgatatgctcctaaaagaatctgagcttaatctcgaccttattaaaaaggcaaaggtattccattatggatcaataagcttgatcactgagccgtgcagatcggcacatctacgggcaatggaggtggctaaggaggcgggtgcactgctttcatacgatcccaatctccgactgccgttgtggccatcgcctgttgatgcccgtgagcagatcatgagcatatgggaccgggcggatatcatcaaggtgagcgatgtggagttggaatttctgactggcagcgataccgtcgacgataaagcagcactgtcgctctggcatccagggattaagcttttgctggtcaccctaggagaaaagggttgcagatactacactaagaatttccatggagctgtggaggcgtttagtgtcaaaacagtggatacaactggcgccggtgatgcatttgttggtgccttactatgcaatattgttgacgaccaagctgtactcgaagatgaagtaagattgaggaaggttctaaaatatgcaaatgcatgcggggcaattactaccaccaaaaagggggcaattccagctcttccaaacgagtctgaaatccttgagctaattaaaggagaatgagcaagaccaactttctatttaca

SEQ ID NO: 1888 - DNA, 913 bp, Fragaria vesca
ggtctaatcgtcagtttcggggagatgctgattgacttcgttcccacagtttcaggtgtttcactggccgaagctccagggttcttgaatgcccccggtggcgccccagccaacgtggccattgctgtctctcggctcggcggcaacgcctccttcgttgggaagctcggtgacgacgagttcgggcacatgctggccggaatcttgaaggagaataacgtctcaggagaaggcatcatgttcgaccaaggtgcacgcaccgctctggcctttgtgaccctacgcgccgacggagagcgcgagttcatgttctacaggaaccctagcgctgatatgctgctcatgcccgaagagctcaacttggagctgattaaatcagctagtgtttcattatggatccattagcttgatcgtagagccatgcaggtcggctcatctaaaggcaatggaggttgccaaagaagcaggtgccttattgtcctacgaccctaacctccggctaccactgtggccctcagctgaggaggcacgcgagcagataatgagtatatgggacaaggcagaagtgatcaaagtcagtgatgttgagcttgagttcctcacaggaaatcccaacattgatgatgaatctgccttgagtctctggcactctaacttgaagctcctccttgtcactcttggtgaaagcttttcgtgtaactgcggtggatactactggtgctggtgattcatttgtgggtgctctgcttgcaaagattgtcgacgaccagtctgttcttgaaaatgagcaaaggttgagggaagtactgaaatttgcaaatgcatgtggagcaattaccactacaaagaagggagccattcctgcactccccaacgagtctgaagtcctcgccctaatcaatggagcatagat

SEQ ID NO: 1889 - DNA, 1166 bp, Brassica napus
cagttaacaagagtctatataaacactccccctcttctccttccttcattttatattactatactctcctctcttcctcctcgatttgatctcaatcatcatcccaacagatctgatggcacccaccggcgagaaacccctcatcgtcagcttcggcgagatgcttatcgacttcgtccccaccgagtccggcgtctccctcgccgaagccccgggcttcctcaaagccccggcggcgccccgccaacgtcgccatcgccgtctcccgcctcggcggacgatccgcgttcgtcggaaagctcggcgacgacgagttcggccacatgctggccgggatcctgaggaaaaacggcgtcgccgatcagggcatcaacttcgataccggagctagaaccgccttggcgttcgtgacgttgaaggccgacggagatcgggagtttatgttttaccggaatcctagcgccgatatgctcctccgtcccgatgagctcgacctcgagctcatcagatccgctaaagtgtttcactatggatcaataagcttaatagtggagccatgtaggtcggctcacttgaaagccatggaagtggcgaaagaagcgggagctcttctttcctacgacccaaacctcagggagcctctgtggccatcgaaggaagaagccaagacacagatcatgagcatctgggacaaggctgagatcatcaaggttagcgacgttgagcttgagtttctaactggaagcaacaagatagatgatgagaccgcaatgtccttgtggcatcccaacttgaagcttttgcttgtcactctcggtgaaaagggttgccggtattacgccaagaacttccgtggatccgttgaccctttccatgtgaacgctgtggatacaaccggagctggagattcatttgtaggtgccctcctaaacaagattgccgatgatcactccattctcgaggacgaagagagattgcgaaaggtgctaagattcgcaaacgcttgtggagcaatcaccacaacaaaaaaggagctattccagctcttccttcagaagctgaagttctcagctttcttgaaaagaaatgaaaaaacaaaagtaaagctttctgcacgtaatctgtttccgcttttgtattcttgttggggcactctgctctgtttt

SEQ ID NO: 1890 - DNA, 4174 bp, Glycine max
gagacagttattttcattattatagggggcttataagccatgacactacacgtctacaccagtttactattgcttctcctccaaacattctttgtccgataattgtatacaatactataacataatacccagggcctttatcttttcttcttttccccttctctccttcttctttaactgcttttgctttaattggaagaccaaaaaactggaagaagggtgcaggcatgggaatagtgttagacctcacataacagttaacagttcacatcctctcttcactttgctgacccagggcagctttgatgagctgaccgggtcgttttgtgcagaagcctttaaagcaaaaaaaaaactacctgcccgttgccccccttgtcttgagctaagagaacgaggagcctctctttatccctctattatatgcttgctgctgctgcattgtcttgttctactactacttcagaatctcttctcacttccaagcattaaatagtgtggcaagagcacatacagcaccagaagacgaaagcactaaaggcattttgctctcttttgttgagcttctcgtgtttctctggaattgagaaacagaacaacaaattctcagctctgaaacatagataggtagtgtggagattggggagggagcttccaaagcaatgatattttgctctttgaaagtctgagaagctttggaatttggatatatagaccttctaaaccaaagagaaatatcagggagctgtatgaagtagaagtgtgcaaaaatgagagatgagaattccaagagaagcaagctctcatggtcaaagaaaatggtgaggaagttctttaatatcaaaagcaagactgaggattcccaagcaaatggtgttgcttatggaggaggtgacatggaatatagaggtaggaatagcttctctgagagagaaccatgcacaatcaaaaagagcaaaacagaaaagtttagcaggagcacagatcaggtgaggcgagcaaaaatgaatcttgaccatcctcgaattatagatgtgcagaattatagcatttttgtggctacatggaatgtagctggaagatccccacctagtactttgaatttagatgattggcttcattcttcatcaccggctgatatttatgttcttggatttcaagagatagttcccttgaatgctggtaatatcttgggagcagaagacaatggccctgccaaaaaatggttggctctcatcagaaaggctttaaacaatcttcctggcaccagtggaagtagtggatgctatacaccatctcccatacctcagccagttgtagagctgaatgcagattttgagggatcagctaggcagaagaactcatctttcttccataggcgatcgttccagacaacttctagtggttggggaatggacaatgatccttcagttgtgcagccacggcttgatcgaagatacagtgtctgtgatagagtaatttttggtcacaggccaagtgactttgatcccagttttagatggggttataggcctagtgactattccagggcaagtgactactcaagaccaagtgactactcaagatggggttcatctgatgatgataatggccttggggattcaccaagtacagtcttattttcaccaatgtcttgtggtggtggtggtggtgctggacccgcctttaatgaagatggatatgccatgccaggacactcaaggtactgccttgttgcaagtaagcaaatggtggggatatatcttaccatatgggtgagaagtgaactcaaggatcatgttcaaaatatgaaagtgtcttgtgttggcagaggattgatgggctatcttggaaataagggatccatctcaattagtatgtctgtgcacgaaactagcttttgctttatctgtagccatttaacctcaggacagaaagaaggtgatgaactaagaagaaattctgatgtgatggagattcttaagaagacaaggtttcctcgtgttcaaggtgtggacaatgagaagtctccacagacaatccttgagcatgatcgaatcatatggcttggagatttgaattaccggattgcactctcctaccgatctgctaaggcactcgttgagatgcaaaactggagagcattgttagagaatgatcaattgagaatagagcagaaaagaggccgtgcgtttgtgggatggaatgaagggaagatatattttcctccaacatacaagtattcaactaattcagatagatatgctggagatgatatgcaccccaaagaaaaaaggagaactcctgcttggtgtgaccgaattttgtggtatggagaaggtctccatcagttatcatatgtccgcggagaatcgaagttttcagaccacagacctgtttatggcatattttgggctgaggttgagtcagctcatggcagattgaagaaaactatgagttgttctcgttccagaattgaggtggaggaacttctgccatattctggtggatacactgagctgagctttttctgaaggaagaaaggttggatatacgtgtccatccacattcagcaattggtcccccattaccaagctggaattactttgaagaaaactcattcatggagggagatagggacaacccatttcccacataccgaaaaagtttataatctgtagtttttggctacagtcatgctttgcctaacacatgatcagtacagtacatcatcatcatcttggtagctattcacacaccagtaatgtgcatagtttgatagccaactaacaaacacacaaccttccattgtctcagcccaatttgagtattaacagtccttcacagtcatcaggaagttgatgaaggcaattttttgattcaagattttttaattgtttttggagaatatttatgatgactgaatgaaggtggaagcttgccagaataatcacttgggcactaacatttttttaatgcgaagaaaatgaatttttatttttttaatcctgaaaaaaaatgagtgttttgatgtatagtgattgccaaagtaaatgagaaaaaaaacatgaacaaacaaaaaaagattgttgttcatgatagaattccagagcctctcttgcacagtccatgattaaaattttactgataaaaggtggtggctttgacatcaaaactaaatagtactgctcaccattcattcctgtggctcgtcttttcactgatgaacaacagtatttaagtacaaactaaagtgttattgcggggtttggcaggaatattgggggtttctaattcggggtcctcttgcaagatgctatttacatgcccgtcagttgctgtttacttttgacttggtggactatagccactttttaccttatacttttttttttatgtatgtgtatccacttaggatcactaataagaaaagttgaaaaaacaaatttcgaaactcgggtgttgctgaaaaagactaatgctaaatcgttaattgtgtaataatgccgttttaaaaggaaatataaattttgtggctcatctttgcacatatccactatttaagaatttggggtctgactcattccttcatgagatctcaacggttgaacgtctttgtccctgttggctgttggagagtcacttcatggagatgtgtcactcagatgcaaatatatacttggttgaatttttttagtactgtactagtctcaatgcctagcgaaaaacaagttgtatgtgagtaataaataataatagtagtagtaattgtagtagaaaaatgtgatgagactgtgcaagctgtggcttagtacatgattcttttcacatcatgggacatggagaaagtcaacaccgtctgctgttactaaacctattcatctcatcaagttatattcagcaactaatagtgtatttgttttatgcatttctcaccttgtaaggcatgttggacgccaataccactctcacatgctattcatgttcagcatgtcacaactactatttcaatataatctaaggttgttttttactactttcaaatttcaattaaatgctaagttttgtttttggagttgaaaatttataatcaaacgtatcaatcaattaatacgagattatttcagtttaatcaaaagtatgtagctattaagtatttggagagagaattttg

SEQ ID NO: 1891 - DNA, 2962 bp, Glycine max
ttggaagaccaaaaaactggaagaagagtgcaggcataggaatagtgttagatctcacataacagttaacagttcacatcctctattcgctttgctgaccaagggcagctttgatgagctgaccgggtcgttttatgcagaagccttaaagcaaaaaaaactacctgcccgttgcccccttgtcttgagctaagagaacgaggagtctctctctctatatgcttgctgctgcattgtcttgttctactacttcagaatctcttctcacttccacgcattaaagtgttgtctctctctctttgagttggtggcgctttctttcatatttatcggagtttgcttccatgttcttacactttctactatactagtgtggcaagagcacatgcagcaccagaagaggaaagcaagcaaaaacacttaaggcatttcgctctgttttgttgagcttctcgtgtttctctggaattgagaaacagaacagcaaatgagcctggtcttgtttctcagctctgaaacatagataggtagtgtggagattggagaaggggtttccaaagcaatgatattttgctctttgaaattctgagaagttttggatatataagcatacttctaagccgcagagaaatatcagagagcttgaggagctgtatgaagtagaagtgtgcaaaaatgagagatgagaattccaagaaaagcaagctctcatggtcaaagaaaatggtcagaaagttctttaatatcaaaagcaagactgaggattcccaagaaaatggtgttgcttatggaggaggtgacacggaatatagaggtaggaatagcttctctgagagagagccatgcacgatcaaaaagagcaaaacagaaaagtttggcaggagcgcagatcaggtgaggcgagcaagaatgaatcttgaccatcctcgaattatagatgtgcagaattatagcattttcgtagctacatggaatgtagctggaagatccccaccaagtaccttgaatttagatgattggcttcattcttcaccaccggctgatatttatgttcttggatttcaagagatagttcccttgaatgctggtaatatcttgggagcagaagacaacggccctgccaaaaaatggttggctctcatcagaaagactttaaacaatcttcctggcaccagtggaagtagtggatgctatacaccgtctcccataccacaaccagttgtagagctaaatgcagattttgagggatcagccaggcagaagaactcatctttcttccataggcgatcgttccagacaacttctagtggttggggaatggacaatgatccttcagttgtgcagccacgactagatcgaagatacagtgtctgtgatagagtaatttttggtcacaggccaagtgacttcgatcccagttttagatggggttataggcctagtgactattccagggcaagtgactactcaagatggggttcatctgatgatgacaatggccttggggattcaccaagtacagtcttattttcaccaatgtcttgtggtggtgctggacctgcctttaatgaagatggatatgccataccaggacactcaaggtactgccttgttgcaagtaagcaaatggtggggatatatcttaccatatgggtgagaagtgaactgaaggatcaggttcaaaatatgaaagtgtcttgtgttggcagaggattgatgggttatcttggaaataagggatccatctcaattagtatgtctgtgcatgaaactagcttttgctttatctgtagccatttaacctcaggacagaaagaaggtgatgaactaagaagaaattctgatgtgatggagattcttaaaaagacaaggtttcctcgtgttcaaggtgtggacaatgagaattctccacagacaatcctcgagcatgatcgaattatatggcttggagatttgaattatcggattgcactctcctaccgatctgctaaggcactcgttgagatgcaaaactggagagcattgttagagaatgaccaattgagaatagagcagaaaagaggccgtgcgtttgtgggatggaatgaagggaagatatattttcctccaacttacaagtattcaactaattcagatagatatgctggagatgatatgcaccccaaagagaaaaggagaactccagcttggtgtgaccgaattttgtggtacggagaaggtctccatcagttatcatatgtccgcggagaatcaaagttttcagaccacagacctgtttatggcatattttgtgctgaggttgagtcaactcatggcagattgaagaaaactatgagttgttctcgttccagaattgaggtggaggaacttctgccatattctggtggatacactgagctgagttttttctaaaggaagaaagcaattggtcccccattaccaagctggaattactttgaagaaaactcattcatggagggagatagggacaacccatttcccacatacccaaaaagtttataatctgtagttttgggctacagtcatgctttgcctaacacatgatcagtacagtacatcatcatcttggtagctattcacatttttgcttcagtaatgtgcatagtttgatacccaactaacaaacacacaaccttccattgtctcagcccaatttgagtattaacagtccttcattgtcatcaggaagttgatgaattgaagacgattttttgattcaggattttttaattatttttggagaatatttatgatgactgaatgaaggtggaagcttgtcagaataatcacttgggcactaacatttttttaatgcgaagaaatgagtttttatttatttatttttttaatcctgaaaaaaatgagtgttttgatgtatagtgattgccaaagtaattgagaaaaatatgtgaacaaacaaaaaaagattgatgttcatgat

SEQ ID NO: 1892 - DNA, 2397 bp, Cajanus cajan
ttttgtctatctgttgcctgatgaagctctcatggtcaaagaaaatggtcagaaagttctttaatatcaaaagcaagactgaggattctcaagcagatgttgcttatggaggaggtgacgtggaatacagaagtaggaatagcttctctgagagagagccatgcacaataaagaagagtaaaacagagaagtttagcaggagcacagatcaggtcaggcgagcacgaatgaatcttgaccatcctcgaattatagatgtgcagaatcatagcatttttgtagctacatggaatgtagccggaagatccccaccaagtaatttgaatttagatgactggcttcattcttcgccaccagctgatatttatgttcttggatttcaagagatagttcccttgaatgctggtaatatcttaggggcagaagacaatggccctgccaaaaaatggttggctctcatcagaaagactttaaacaatcttcctggcaccagtggaagtagtggatgttatacaccatctcccattcctcagccagtggtagagctgaatgcagattttgagggatctactaggcagaagaactcatctttcttccataggcgatcattccagacaacttctagtggttggggaatggacaatgatccttcagttgtacagccgcagctagatcgaagatacagtgtctgtgatagagtgatttttggtcacaggccaagtgactttgatcccagtttcagatggggttatagacctagtgactattccagggcaagtgacttctcaagaccaagtgactactcaagaccaagtgactactcaagatggggttcgtctgttgatgataatggccttggagattcaccaagcacagtcttattttcaccaatgtcttatggtggaggtggacttgctttaaatgaagatggatatgccatgccaggacactcaaggtactgccttgttgctagtaagcaaatggtgggaatatatctaaccatatgggtgagaagtgaactgaaagatcatgttcaaaatatgaaagtgtcttgtgttggcagaggattgatgggctatctcggaaataagggatccatctcaattagtatgtctgtgcatgaaacaagcttttgctttatctgtagccatctaacctcaggacagaaagagggtgatgaaataagaagaaattctgatgtgatggagattcttaagaaaacgaggtttcctcgtgttcctggtgtggacaatgagaagtctccacagacaatcctcgagcatgatcgaattatatggcttggagatttgaattaccggattgccctctcctaccgttctgctaaggcacttgttgagatgcaaaactggagagcattgctagagaatgatcaattgagaatagaacaaaaaagaggccgtgtgtttgtaggatggaatgaagggaagatatattttcctccaacatacaaatattcaactaattcagatagatatgctggggacgacatgcaccccaaagagaaaaggagaactcctgcatggtgtgaccgtattttgtggtttggagaaggtctgcatcagttatcatatgtccgcggcgaatcaaagttttcagaccacagacctgtttatggcatattttgggctgaggttgagtcagctcatggcagattgaagaaaactatgagttgttctcgttccagaattgaggtggaggaacttctgccatattccggtggatacactgaactaagctttttctaaaggaaggttggatatgagacgtgtccatctgcattcagcaattggtcccccattaccaagctggaataactttgaagaaaactcattcatggagggagatagggacaacccatttcccacataccgaaaaagtttataatctgtagtttttggctacagtcatgctttgcctaacacatgatcagtacagtacatcatcatcatcatcatcttggtagctactcacacaccagcttcagtaatgtgcatagtttgatacccaactaacaaacactaaaccttccagcgtctcagcccatttttatcatcaatagtccttcacagtcttcaggaagttgatttttttattcaagattttttaattgttttttcgagaatatttatgatgattgaatgaaggtgaaagcttgtcagaataatcacctgggcactagcattttttttaatgcgaagaaaatcagagtttttttttttcttcttttttctgtatcatgtgaaaatgagttttaaagtgtagtggttgccacttgccacagtaattgagaaaaaatatgaacaaacataaaagattgattttcatgatacaaccccagagcctctcttagtgagtccatgattaaaattttactga

SEQ ID NO: 1893 - DNA, 3013 bp, Cicer arietinum
ttttctttaattatttaatattaataaagctattgtatggtttcttttactgcgctttattctgttcaaattcgatactttgtttgttgtagttgttgcagagaccgaggagattgctttctatctctaaccttgttgcattgtcttctttctcacttccatgcattcataaagtcttctctctctcttatttatgtgaatttgcttccatcttcttattacactttttattttattagtgttgcaacttcaccacatagatacaccacaagaggaaagtaattggagaacactgaaactggctagggggtgtatgaagtagaagtgtcaaaatgggagatgaaaattccaagaaaagcaagctctcatggtcaaagaaaatggtcaggaagttcttcaatatcaaaagtaaatgtgaatgttcccaagcagatactgttgtttatggaggaggtgaagtggaatatggaagcaggaatagcttctctgagagagagccatgcacaatcaagaagagcaaaacagagaggtttagcaggagcaccagtcaggtcaggcgaggaagaatgaatctcgaccatcctcgaattattgatgtgcagaaccatagcattttcgtagctacatggaatgtagctggaagatcaccaccaagtaatttgagtttagatgattggcttcattcctcaccaccagctgatatttatgttcttggatttcaagagatagttcccttgaatgccggtaatatcctcggggcagaggacaatggccctgcgaaaaaatggttatctctcatcagaaagacattaaacaatcttcctggaacaagtggaagtagtggatgttatacaccgtctccgattcctcaaccagttgtagagctgaatgcagattttgaaggatcggctaggcagaagaattcgtctttcttccacaggcgatcgttccagacaacttctagtggttggggaatggacaatgatccttcggttctgcagccgcaactagaccgaagatacagtgtatgcgatcgtgtaattttcggccacaggcctagtgactttgatcctagtttaagatggggttataggcctagtgactattcaagggcaagtgactactcaagaccaagtgactattcaagatggggttcatctgatgatgataatggacttgtggattcgccaagtacggtcttgttttcaccaatgtcttatggtggtggatctgcctctaatgaagatggatatggcatgccggggcattcaaggtactgccttgttgcgagtaagcaaatggtgggaatctaccttactgtatgggtgaaaggtgaactgaaagatcatgttcggaacatgaaagtgtcttgtgttggcagaggattgatgggttatctcggaaataagggatcaatctcaattagtatgtctgtgcatgaaacaagcttttgctttatctgtagtcatttaacctcaggacaaaaagagggtgatgaactaagaagaaattctgatgtgatggagatacttaaaaagacaaggtttcctcgtgttcatggcgtggacaatgagaaatctcctcagacaattcttgagcacgatcgaattatatggcttggagatttgaattatcggattgctctctcctaccgttctgctaaggcacttgttgagatgcaaaattggagagcattgttagaaaatgatcaattgagaatagagcaaaaaagaggccgcgcatttgtaggatggaatgaagggaagatatattttcctccaacatacaagtattcaactaattcagatagatatgcgggcgatgatatgcacccgaaggagaaaaggagaacacctgcttggtgtgaccgaattttatggtatggagaaggtctgcatcagttatcttatgttcgcggagaatccagattttcagaccacagacctgtttatggcatattttgggctgaggttgagtcaactcatggcaaattgaagaaaagtatgagttgttctcgttccagaatcgaggtggaggaacttctgccgtactccggtggatatactgaactaaactttttctaaagaaaaggaaagacgaataagagacgtgtccatcgatattcaagaagttactttgaatgaattctttcatggagggagatagatagggacaacccatttcacatataccgaaaaagtttataatctgtagaattttggtcatgctttgcctaacacatgatcactacaacacattatcttgctagtactgtccataatttgataccatataaacaaatactcaagtttccacttttacaatcattaggtagttgaagaagaggatttttttattcaagattttttaattgtttttggagaatatttatgatgactgaaagattgtcagaataatcatttggacactaacttttttttattttaaaaatgtaatgtaaagagaatgagagttttgatgtatagtaattgctgccacagtaattgagtaaagaaacaaaaaaaaaaaattgaagttcatgatagatgccagaaactttcttgtgctatctgtgcctgcacgataatttttttactgataaagttggcttgacatcaaaatcaaatagtaacacactacagttgctgaggttcttctttatactaatgaagaatagtagttgagtatttaacaaactataagaggcatgtaggtttggcgggaataatttttggaggctctaatgcaacagggccctcttgtttcaagattctatttacatgcctgtccatttctgtttacttttgactaggtggactttagctactttaccatatgacatttcttatgaatccagaaagaatccggatgctgcattaacgtgatttcgtgttcaccacatttggaagatttagtgatcatctaatcttgattgaatggtccaaaatatgtatattttagttttttcacaatataactcaaaatacttaacttgaatttgaacagtattatt

SEQ ID NO: 1894 - DNA, 2765 bp, Medicago truncatula
ttgctttctctttctatctctaaccttactgcattgtcttgttctacttattacttcagaatctcttctcacttccatgcattattcttaaagtgctattcttgttctctctcttatttatgggaatttgcttcattcttcttcttcttcttagtacacttttaaatattatagtatagcaagatcatacatagcacttacaagaagataacaaggaaacaaatgaacttggtcttgtttcttaactcaaaatatcactgaaatatcagaaactggcttgggagttgtagaaacttgctagggaggtgtatgaagtagaagtgtcaaaatgggagatgagaattccaagaacaccaagctctcatggtcaaagaaaatggttagaaagttttttaatttcaaaagcaaatgtgaagatattcaagcagatgctgttgtttatggaggaggtgaggttgaatatggaagtaggaatagcttctctgagagagaaccatgcacaatcaaaaagagcaaaacagagaagtttagcaggagcacgagtcaggttaggcgaggaagaatgaatcttgaccatcctcgaattatcgatgtgcagaactatagcatttttgtagcaacatggaatgtagctggaagatccccaccaagtaatttgagtgtagatgattggcttcattcctcacctccagctgacatttatgttcttggatttcaagagatagttccgttgaatgccggtaatatcctaggggcagaggacaatggccctgccaaaaaatggctggctcttatcagaaagactttaaacaatcttcctggaaccagtggaagtagtggatgctatacaccgtctccaattcctcagccagttgtagagctgaatgcagattttgagggatcagctaggcagaagaattcgtctttcttccacaggcgatcattccagacaacttctagtggttggggaatggacaatgatccttcacttgtgcaaccacaagttgatcgaagatacagtgtttgcgatcgtgtaattttcggtaacaggcctagtgactttgatcctagtttaagatggggttataggcctagtgactattcaagggcaagtgactactcgagaccgagtgactattcaagatggggatcgtctgatgatgacaatggccttgtggattcaccgagtacagtcttatattcaccaatgtccactaatggtggatctgcctctaatgaagatggatatagcatgccaggacattcaaggtactgcctcgttgcaagtaagcaaatggtgggaatctaccttaccgtatgggtgaaaggcgaactgaaagatcatgtccgaaacatgaaagtatcgtgtgttggcagaggattgatgggatatctaggaaataaggggtccatctcaattagtatgtctgtgcacgaaacaagcttttgctttatttgcagtcatttaacctcaggacagaaagagggtgatgaactaagaagaaattctgatgttatggagattcttaaaaagacaaggtttcctcgtgttcatggtgttgacaacgagaaatctcctcagacaatcctcgagcacgatcgaattatatggcttggagatttgaattatcggatcgctctctcctaccgttctgctaaggcacttgttgagatgcaaaactggagagcattgctagaaaatgatcaattgagaatagagcaaaaaagaggccgcgcttttgtgggatggaacgaagggaagatatattttcctccaacttacaaatattcaactaattcagatcgatactcaggagatgatatgcaccccaaggaaaaaaggagaacacctgcttggtgtgaccgtattctatggtatggagaaggactccatcaattgtcttatgttcgcggtgaatcaagattttcagaccaccgacctgtttatggcatattttgggctgaggttgagtcacctcacggaaaattgaagaaaagtatgagttgttctcagtcaagaattgagttggacgaacttttgccatattccggtggatatactgaactaaactttttctaaagaagggaaggttgaacaggagacgtgtccatccatattcaaaaaatggtccccttttaccaatagggattttactttgaagaaatactttcatggagggagatagatagggacaacccatttcccatataccgaaaaagtttctaatctctagttttggtgctttgcctaacacatgatatgatcaatacaacacatcatcttgataccaaattaacaaacacttgagtttccactttaacaatcattaggtagttgatgaagaggatttttttattcaatattttttaattgtttttagggaatatttatgatgactgaatgtagttgaaagattgtcagaataatcatttgtgcactaactttcttttttaatgtaatgtaaagagaatgagagttttgatgtatagtggattgctgcaacaatataattgagtaaagaaaaggaacaaaaaagaaattgaagttcattatatagattccaaaaactctcttgtgctgagttctctgtctatgtctgcatgataatttttgtactgataaagttggttttgacatcaaaatcaaatagtaaagctcttctttttactaataaggaacagtattcgagtatttaacaaaccaaaagaggcatgcaattttggcgggaataataattgttggaggctctaatacaataaggccc

SEQ ID NO: 1895 - DNA, 2191 bp, Trifolium pratense
ataacaaggaaacaaatgaacttggtgttttttcttagctcaaaatatcactgaaaaattcagaaagtgtcaaaatgagagatgaaaattccaagaaaactaagctctcatggtcaaagaaaatggttagaaagtttttcaatatcaaaagcaaatgtgaagattcacatgaagatgctgttgtttatggaggaagtgaggttgaatatggaagcaggaatagcttctctgagagagaaccatgcacaagcaaaaagagcaaaatagagaagtttagtaggaacagcagccaagttagacgaggaagaatgaatctcgaccatcctcgaattatcgatgtgcagaactatagcatttttgtagctacatggaatgtagccggaagatccccgccgagtaatttgcgtgtagatgattggcttcattcctcaccaccagctgatatctatgttcttggatttcaagagatagttccgttgaatgccggtaatatcctaggggcagaagacaatggccctgccaaaaagtggttggctcttatcagaaagactttaaacaatcttcctggaaccagtggaagtagtggatgttatacaccgtctccaattcctaagccagttgtagagctgaatgcagattttgaaggatcagctaggcagaagaattcgtctttcttccataggcgatcgttccagacaacttctagtggttggggaatggacaatgatccttcagttgtgcagccacaactagatcgaagatacagtgtatgtgatcgtgtaattttcggtaacaggcctagtgactttgatcctagtttaagatggggttataggcctagtgactattcaagggcaagtgactactcgagaccgagtgactattcaagatggggttcgtctgatgacgataatggccttgtggattcaccaagtacagttttattttcaccaatgtcgacttgtggtggatctgcctctaatgaagatggatatggtatgccaggaggaaattcaaggtactgccttgttgctagtaagcaaatggtgggaatctaccttaccgtatgggtgaaaggcgagctgaaagatcatgttcgaaacatgaaagtatcgtgtgttggcagaggattgatgggttatctcggaaataagggttctatctcaattagtatgtctgtgcatgaaacaagcttttgctttatctgtagtcatttaacctcaggacaaaaagagggtgatgaactaagaagaaattctgatgtcatggagattcttaaaaagacaaggtttcctcgtgttcatggtgttgacgatgagaaatctcctcagacaatcctcgagcacgatcgaattatatggcttggagatttgaattatcggatttctctctcctaccgttctgctaaggcacttgtcgagatgcaaaattggagagcattgttagaaaatgatcaattgcgaatagagcaaaaaagaggtcgcacgtttgtgggatggaaggaagggaagatatattttcctccaacatacaagtattcaactaattcagatcgatattcgggagatgatatgcaccccaaggagaaaaggagaacacctgcatggtgtgacaggattttatggtatggagaaggtctccatcagttatcttatgttcgcggggaatcaagattttcagaccatagacctgtttatggtatattttgggctgaggttgagtcacctcatggaaaattgaagaaaagtatgagttgttctggttccagaattgaggtggacgaacttctgccatattccggtggatatactgaactaaactttttctaaagaaaggaaagcttagtaagagacgtgtcgatccatattcaacaaaatggtcccccattagcaataggaaatttactttgaaggaattctttcatggagggagatagatagggacaacccatttcccatataccgaaaaagcttataatctctagttttggtgctttgcctaacacatgatcaatacaacacatcatatcttgataccaaattaacaaacactcaagcttccactttaacaatcattaggtagttgatgaagaggacttttttattcaagattttttaattatttctagagaatattttatgatgactgaatgaaggtggaagattgtcagaataatcatttgagcactaac

SEQ ID NO: 1896 - DNA, 2342 bp, Trifolium pratense
cctttagattcaatctcttgtttcattcttctaagtacacgttttaatattagtgttgcaagatcacacatagcactacaacaacagggaaacaaatgaacttggtgttttttcttagctcaaaatatcactgaaaaattcagaaagtgtcaaaatgagagatgaaaattccaagaaaaccaagctctcatggtcaaagaaaatggtcagaaagtttttcaatatcaaaagcaaatgtgaagattcacaagaagatgctgttgtttatggaggaagtgaggttgaatatggaagcaggaatagcttctctgagagagaaccatgcacaagcaaaaagagcaaaatagagaagtttagcaggaacagcagccaggttagacgaggaagaatgaatctcgatcatcctcgaattatcgatgtacagaactatagcatttttgtagctacatggaatgtggccggaagatccccgccgagtaatttgagtgtagatgattggcttcattcctcaccaccagctgatatttatgttcttggatttcaagagatagttccgttgaatgccggtaatatcctaggggcagaagacaatggccctgccaaaaaatggctggctctcatcagaaagactttaaacaatcttcctggagccagtggaagtagtggatgctatacaccgtctccaattcctaagccagttgtagagctgaatgcagattttgaaggatcagctaggcagaagaattcgtctttcttccataggcgatcgttccagacaacttctagtggttggggaatggacaatgatccttcagttgtgcagccacaaacagatcgaagatatagtgtatgcgatcgtgtaatttttggtaacaggcctagtgactttgatcctagtttaagatggggttataggcctagtgactattcaagggcaagtgactactcaagaccgagtgactattcaagatggggttcgtctgatgatgataatggccttgtggattcgccgagtacagttttattttcaccaatgtcgacttgtggtggatctgcctctaatgaagatggatatggtatgccaggaggaaattcaaggtactgccttgttgctagtaagcaaatggtgggaatctaccttaccgtatgggtgaaaggcgagctgaaagatcatgttcgaaacatgaaagtatcgtgtgttggcagaggattgatgggttatctcggaaataagggttctatctcaattagtatgtctgtgcatgaaacaagcttttgctttatctgtagtcatttaacctcaggacagaaagagggtgatgaactaagaagaaattctgatgtcatggaaattcttaaaaagacaaggtttcctcgtgttcatggtgttgacgatgagaaatcccctcagacaatcctcgagcacgatcgaattatatggcttggagatttgaattatcggatttctctctcctaccgttctgctaaggcacttgttgagatgcaaaattggagagcattgttagaaaatgatcaattgagaatagagcaaaaaagaggtcgcacgtttgtgggatggaaggaagggaagatatattttcctccaacatacaagtattcaactaattcagatcgatattcgggagatgatatgcaccccaaggagaaaaggagaacacctgcatggtgtgacaggattttatggtatggagaaggtctccatcagttatcttatgttcgcggggaatcaagattttcagaccatagacctgtttatggaatattttgggctgaggttgagtcacctcatggaaaattgaagaaaagtatgagttgttctggttccagaattgaggtggacgaacttctgccatattccggtggatatactgaactaaactttttctaaagaaaggaaagcttagtaagaaacgtgtccatccatattcaacaaaatggtcccccattagcaataggaaatttactttgaaggaattctttcatggagggagatagatagggacaacccatttcccatataccgaaaaagtttataatctctagttttggtgctttgcctaacacatgatcaatacaacacaccatatcttgataccaaattaacaaacacccaagcttccactttaacaatcattagatagttgatgaagaggacttttttattcaagattttttaattatttctagagaatattttatgataactgaatgaaggtggaagaatgtcagaataatcatttgagcactaactttatttttaatgtaatgtatagagattgagagttttgatttgatgtatagtgattgctgccacagtaatt

SEQ ID NO: 1897 - DNA, 2904 bp, Glycine max
cgggaagaaagattacagctatagatactgctagatctcactcactttgctgaccaggggcaggctttgttcatctgaccgaaacgttttatgttcagaaacgttaaagctaaacgacctgcccgttgcccccttcatgtttgccttgtcttcaactgagagaacgaggcactatgtttccaagagagagaaacacagcttgaagctctctctttctctctctttgtttacctgtcgcattgtcttgttccacttcagaatctcatctcacttccacgcattaaagacttaaaggcgttgcctctctttctagttggttccttgcatatttacggggactttgtttctttgttcttacatttttaagagcagaacacattcacctattttgctgctttgattctttgttgctctcagcttgaaaagctgagcacccggataagagcttgttcttgtttctatactctcaaacaaagagacaggctgaaaatcggagaaaggggtttcacaagaagagaattttgttccttcaattgttgacaattttgggtagctcttggagtacaacatagcatacttgaggagctttatgaggtagaagattaacaatgacagatgggaattccaagaaaagcaagctgtcatggtcgaagagaatggtcagaaagttcttcaatatcaaaagcaaagctgaggactcctaccaatcaaatggtgttgcttatggaggagatgacgtagaatatagaagcaggaacagcagcttctctgagagagagatcaaaaagagcaaaacagagaagtttagcaggaacacagagcaggtcaggcgaggaagagtgagtctcgaccatcctcgaattattgatgtccataactacagcatttttgttgctacgtggaatgtggctggaagatccccaccgagtaatttgagtatagatgattggcttcatgcctcaccaccggcagatatttatgttcttggatttcaagagatagttcccttgaatgctggtaatatcttaggcgcagaagacaatggacctgccaagaaatggctagctctcattggaaagaccttaaacaaccttccgggtactagtggaggtggtgggtattatacaccatctccaatccctcagccagtggtagaaataaatgcagactttgagggatcagctaggcaaaagaattcatcattcttccatcgccgatctttccagactacctctagtggctggggaatggacaatgatacttcaactatgcagccacgactagatcgaagattcagtgtctgtgatcgtgtgatttttggtcacaggaaaagtgactttgatcccagctttagatggggttataggcctagtgactattccagggcaagtgactactccagacccagtgactattcaagatggggttcatctgatgatgacaatggccttggagattcaccaagcacagtctcaccattgtcttatggtggacctgcctctgctgaagatggatatggtatgccagggcgttccaggtactgccttgttgcaagtaagcaaatggtaggtatatttcttaccatatgggtgagaagtgaattgaaagatcatgtacgaaacatgaaagtatcctgtgttggcagaggattgatgggttatcttggaaataagggatccatctcaattagcatgtctctacatgaaacaagcttttgcttcatatgtagccacctaacctctggacaaaaagagggtgatgaactaagaagaaattctgatgtgatggagattcttaaaaagacaaggtttccacgtgtacatggtgctgacaacgagaagtctccagagacaatcctcgagcatgatcgaattatatggcttggagacttgaattatcggattgccctctcttaccgttctgctaaggcacttgttgagatgcaaaactggagagcattgttggagaatgaccagttgagaatagagcagaagagaggtcgtgcatttgtgggatggaatgaagggaagatttatttccctccaacatacaagtattcaactaattcagataggtatgcaggagatgatatgcacccaaaggagaaaaggcgaacacctgcttggtgtgacaggattttgtggtacggagaaggtctccatcaattatcttacgtccgtggagaatcaaggttttcagaccacaggccggtttatggcatattttgggctgaggttgagtcaagtcatggaagactgaagaagagtatgagctgttctcggaacagaattgaggtggaggaactcttgccatattcccatggatatactgaactaagttttttctaatggaaggagaggactagctatgggatttcagcacctggtcaacaagcgggagtcacctcgcttagaagaattttatccatggagactgatagagacaacccatttcccacataccgaaaaagccatgcctaacacatgatcagtacacacagtccctcatcatcatctcgttagcaactgtgcaagtgtgcattatttgatagccaattaacaaacactcaactttacaatgtctcaaaactccgtacttcattggcagtcttgcacaatcattaggaggaggcggaaggagaccatttttttatttaattaatcattctttaattgtttttggagaatattcatgatgactgaatgaagctgaaaagatcgtcaaaataattattagggtactaactttttttgtttttaagtgcagagaaaatgagaattttgatgtatactccacttattgattgctacagtgatgaaaaagaaattgtacaaaaaacaaaatcttgttaattaatgatagaattccagagcctccactccttagtttctgactctgttcaca

SEQ ID NO: 1898 - DNA, 2270 bp, Cajanus cajan
ttttgtgtttttgggccttgtgaagctctcatggtcgaagagaatggtcagaaagctcttcaatatcaaaagcaaagctgaggactcctaccaatcaaatggtgttgcttatggaggaggtgacgtagaatacagaagcaggaacagcttctctgaaagagagccttgcacaatcaaaaagagcaaaacagagaagtttagcagaaacacggagcaggtcaggcgagggagagtgagtcttgaccatcctagaattattgatgtccataactatagtgtttttgttgctacatggaatgtggctggaagatccccaccaagtaatttgagtatagatgattggcttcatgcttcaccacctgctgatatttatgttcttggatttcaagagatagtacccttgaatgctggtaatatcttaggagcagaagacaatggccctgccaaaaaatggcttgctctcattggaaagactttaaacaatcttcctggtactagtggaggaggagggtattatacaccatctcccattcctcaaccggtggtagaactaaatgcagattttgagggatcagctaggcaaaagaattcgtcattcttccatcgccgatcattccagacgacttccagcggctggggaatggacaatgatccttcaactatgcagccacgattggatcgaagattcagtgtttgtgatcgtctgatttctggtcccaggaaaagtgactttgatcccagttttagatggggttataggcctagtgactattccagggcaagtgactactctaggccaagtgactattccagatggggttcatctgatgatgacaatggccttggagattcaccaagcacagtattgttttcaccactgtcttatgctggacctacctttgctgaagatggatacaccatgccagggcgttccaggtactgcctcgttgcaagtaagcaaatggtaggaatatttctcaccatatgggtgagaagtgaattgaaggatcatgttcgaaacatgaaagtatcatgtgttggcagaggattgatgggttatcttggaaataagggatccatctcaattagcatgtctctacatgaaacaagcttttgcttcatttgcagccacttaacctcaggacagaaagagggtgatgaactaagaagaaattctgatgtgatggaaattcttaaaaagacaaggtttccacgtgtacatggtgctgacgacgagaagtctccggagacaatcctcgagcacgatcgaattatatggcttggagacttgaattatcggattgcgctctcttaccgttctgctaaggcacttgttgagatgcaaaactggagagcattgttagagaatgaccagttgagaatagagcagaagagaggtcgtgcatttgtgggatggaatgaagggaagatttatttccctccaacttacaagtattcaactaattcagataggtatgcaggagatgatatgcatccaaaggagaaaaggagaacacctgcttggtgtgaccggatattgtggcatggagaaggtctccatcaattatcttacgtccgcggagaatcaaggttctcagaccacaggccggtttatggcatattttgggctgaggttgagtcaagtcatggaagattgaagaaaagtatgagctgttctcgaaacagaatcgaggtggaggaactcttgccatattcccacggatatactgaactaagttttttctaatggaaggaggactagctataggatttcagcacctggtcaacacctcagtttgaagaattttatccatggaaactgatagagacaagccatttcccacataccgaaaaagtttcatctcatgccttgccaaacatatgatcagtacacagttcctcatcatcatctcgttagaactcacgctactgtgaaagtgtgcattatttgatagccaattaacaaacactcaactttacaatgtctcataacaccgtaccttcattggcaaaatcattaggagccggaacgagaccattttttatttaattaatcattctttaattgtttttggagaatattcatcatgactgaatgaagctgaaaagatcgtcaagataatcattagggtactaactttttttttttttgaggaaatgagaattttgatgtatactgattgctacagtgatgaaaaagaatttgtacaaagaaaaaagaaagaaagaaagttctagttaattattgatagaattccagagcctccact

SEQ ID NO: 1899 - DNA, 1768 bp, Lotus japonicus
ttgtctctatctgttgcttaatgaagctctcatggtcaaagaaaatggtcaggaagttctttaatatcaaaagcaaaagtgaagattcccaagcagatggtgttccttgtggaggaagtgatgtggattacagaagcaggagtagctgctctgagagagagccacgcacgatcaagaagagcaaaacagagaaatttagcaggagtgctgatcaggtcaggcgaggaagaatgaatcttgaccatcctcgaattatagatgtgcagaactatagcatttttgtaggttcatggaatgtagctggaagatccccaccaagtaatttgagtttagatgattggcttcattcgtcaccaccggctgatatttacgttcttggatttcaagagatagttcccttgaatgctggtaatatcttaggggcagaggacaatggtccagccaaaaaatggttgtctctcatcagaaagactttaaacaatcttcccggcaccagtggaagcagtgcatgttatacaccctctcccattcctcagccagttgcagagctaaatgcagattttgagggatcagcaaggcagaagaattcttctttcttccaccgacggtcattccagacaacttctagtggatggggaatggacaatgatccttcagttatgcaaccacgactagatcgaagatacagtgtctgtgatcgtgtaatttccggtcacaggccaagtgacttcgatcccagtcttagatggggttataggtcaagtgactattccagggcaagtgactactcaaggccaagtgactactcaaggccaagtgactattcaagatggggttcatctgatgatgataacggccttggagattcaccgagtactgtcttatattcaccaatgtcttatggtggacctgctgcctctaatgaagatggatatggcatgccaggaaattcaaggtactgccttgttgcaagtaagcaaatggtgggaatatatcttaccatatgggtgagaagtgagttgaaagatcatgttcaaaacatgaaagtatcatgtgttggtagaggattgatgggctatcttggaaacaagggatccatctcaattagtatgtctgtccacgaaacaagcttttgctttatctgtagtcatttaacctcaggacagaaggagggagatgaactaagaagaaactctgatgtgatggagattcttaagaagacaaggtttcctcgtgttcatggtgtggacaacgagaagtctcctcagacaatccttgagcatgatcgaattatatggcttggagatttgaattatcggattgctctttcctaccgttctgctaaggcacttgttgagatgcaaaactggagagcattgttagagaatgatcaaaaaagaggtcgtgcgtttgtgggatggaaggaagggaagatatattttcctccaacatacaagtactcaactaattcagatagatatgcaggagatgatatgcaccccaaggagaaaaggagaacacctgcttggtgtgaccgtattttgtggtacggagaaggtctccatcagttatcttatgtccgtggggagtcaaggttttcagatcacagaccagtttatggcagatttggggctgaggttgtgtcaactcatggcaaaatgaagaaaagcatgagttgttctcgttccagaattgaggtggaggaacttctgccatattctggtggatacactgagctaacctttttctaaaggaaggatggcaagat

SEQ ID NO: 1900 - DNA, 2823 bp, Cicer arietinum
gagcaatgaaatgtgattctgtgtctcactaaatgcgctttattccgttcaaatcgaatagtttagtgttatgttacagagaaagaggagctatatgtttccaagagagagagagagagaatacacaaacactcacacacacattctacttcacttcatttcgattcaaacctttctttctttctttctttgcttcttctacttcatattccaaacattcattctttcaatacttataagggtgacttgccttaccactgtgtctgcaaaatcacacaacaacatttcagagtaccttcaattggaaactctaacattaaataataactcatacttcaggacctgtatgaagtagaagattaacaatgagagatgagaataccaacaaaaccaaggtctcatggtcaaagagaatggtcagaaaattcttcaacatcaaagccaaaactgaggtctcttatcaaattcaaagggatgctgttgcttctggaggaggtggcttagaatacagaagcaggagtagtttgtctgagagagagccatgcacaatcaaaaagagcaaaacagagaaatttagcaggaactcgagtcaggtccggcgagggagaatgaaccttgaccatcctagagttttagatgtccacaactatagcatttttactgctacatggaatgtggctggaagatctccaccaactaatttgagcatcgatgattggcttcatgcctcgccgcctgcagatatttatgttctcggatttcaagagatagttccattgaatgctggtaatatcttaggggcagaagacaacggtcctgcgaaaaaatggctggctctcattggaaagactttaaacaatcttcctggtactagtggaggcaacggatactacacaccttctcctattcctcagccgatggtagaattgaatgcagattttgaaggatcggctaggcagaagaattcatcattcttccatcggcgatccttccaaacaacttctagcagttggggaatggacaatgatccttcgactgtgcaaccgcgactagaccgaagattcagtgtttgtgatcgtgtgattttcggtaacaggaaaagtgacttcgatccgagttttagatggggttataggcctagtgactattcaagggcaagtgactactctagaccaagtgactattcaagatggggttcatctgatgatgacaacggcctcggagattctccaagtccagtcttgttttcaccgatgtcttatggtgggcctggtacctcgggagaagatggatatggcatgccgggacgctcaaggtactgccttgttgcaagtaagcaaatggtgggaatctttcttaccatttgggtgagaggtgaattgaaggatcatgttaaaaacatgaaagtttcatgtgttggtagaggattgatgggttatcttggaaataagggttccatctcaattagcatgtcgctgcatgaaacgagcttctgcttcatttgtagccacttaacctcaggacagaaagagggtgatgaactaagaagaaattccgatgtaatggagattcttaaaaagacaaggtttccgcgtgttcatggttctgacaatgagaagtctccagagacaatccttgagcatgatcgaattatatggctcggagatttaaattatcgaatagccctctcctaccgttctgccaaggcacttgttgagatgcaaaactggagagcattgttagagaatgaccagttgagaatagagcaaaagagaggtcgtgcgtttgtgggatggaatgaagggaagatctatttccctccaacatataagtattcaaccaattcagataggtattctggagacgacaagcactcgaaggagaagaggcgaacacctgcttggtgtgaccgtattttatggtatggagaaggcctacatcaattatcttacgtccgcggggaatcaaggttttcggatcatagaccggtttatggcatattttgggctgaggttatgtcaaatcatggaaaattgaagaaaagtatgagctgttctcggtcgagaatccaggtggaggaacttttgccatattcccatggatacactgagctgaactttttctgaaggaagaaggactagatgtgagatttgtgcagccctgttcaacacctggtcaacaaacaggagtccctttgaagatatttatatttatttattagtccttgaagattgatgatagagacaaagcatttcccaaataccaagaaaggtcctaatatgtaattttgtttaacactactcatgtctcatgccttacccaacacatgatcacaagattccatcaacatcatcatcatcttgttatgttcactacactcactacttgtgcataatttgatatgatacccaattaacaaacactcaaaaagcaatgtctcaatgctccgtactacatcttgcacaatcattattaggagtgaggatgaagaagaagacatttttttatccatgattctttaattatttttggagaatattcatgatgaccgaatgaaagtgaaacattgtcaaaatcatcatttggtggtgtactaatttttgtttgtttctaattttgaaaaaaatgataaatttgatgtatactatgatgaaaaagaaaatgtacaaaagaaaaagaaaggaatttatagttaattaatgatagaattccagagattgcagtgattttactgttaaaggtagatttgtcatcatcatcaactagcgtgctcttctttatattgctgtgttaattttttaattaattaatttagcaaactag

SEQ ID NO: 1901 - DNA, 3364 bp, Theobroma cacao
aaaaaaaaaaaggagtagacattagggagtctgagtgagtgaggctttctctctccgctgcactttattctgttcaaattcgatactttgctgttttactgagaacgaggctctctttgtttaacaaagaaagggagggggactgcttggtctcttacgagctttctctctctagactttcatctctctttctttctctttctttatgtctgccgcattgtcttgttctacttcaagaatctcccttctcatctcacttccacgcattaaagtgctgtctctatttctctctctttctccatccctctctctttttcttgagacgttgtagcttcatattttctgggttttggcttccttctttgctttcatatacgtagtagcgctaaagagaggatactaggacaaccccatttcttgttttcttctccttgattcaacttcaaccttattttgagcaagcgaagataaatacatttgctttttttaagctagctatctgggaacaaagaactcagcttgtttttactctagtaaaaattaagcccagaaattggggaaggagagtcctgcctatggggttctggtagcagttttttttttttttggtgattacaaccgaagctgggagtttggggaacggtaaagtgtaacattaggagctgtatgaagtagaagtctaacaatgagagatgggaaacccaagaaaagcaagctctcatggtccaaaaaaatggtcagaaaatggttcaatatcaagagcaaaactgaggactttcaagcagatgatcatgtttatggaggaggtgaagtggaatacaggactagcttctcagaaagagagccatgcacgattaaaaagagtaaaacagaaaaatttagtaagaatacagagcaaagccggcgagggagaatgaatcttgaccaccctcggatcatagatgtccaaaattacagcatttttgtagctacatggaatgtggctggaagatctccacctagcaatttgaatctagaagattggctccatgcctcaccccccgcagatatatatgtccttgggtttcaagagatagttcctttgaatgctgggaatattttgggggcagaagacaatggtcctgccaaaaaatggttgtctctcattagaaagactctaaataatcttcctggaaccagtggaggaggggggtgctatacaccatctcctgttcctcagcccattgttgagatggatgctgattttgaggggtcatctaggcagaaaaattcatctttctttcatcgccgatcatttcagacaaccagcagctggagaatggacaatgacccctcgatttcacagccacgacttgacaggcgatacagcgtctgtgatcgggtaatatttggtcataggccaagtgactatgactccagttatagatggggtaataggcctagtgattactccaggcccagtgattattccaggcctagtgattactccagatggggctcttcagatgatgataatgggattgcagattcaccaagtactgtattgtactctccaatgtcttatggtggatcagcatccaatgaacaaggatataggatgcctgggcattcaaggtactgcttagtggctagtaagcaaatggttggcatatttcttacaatttgggtgagaagtgaattaagagatcatgttaaaaacatgaaagtatcttgtgttggcagaggattgatgggctatctgggaaataagggttctatatctgtcagtatgttgttgcatcaaacaagcttttgcttcatctgtagtcatttaacttcgggacaaaaggagggtgatgagctaagaaggaactctgatgtcatggagattcttaagaagacgaggtttccacgggttcataatgcagctgatgagaagtcccctgaaacaatccttcagcatgatcgaataatttggcttggggatttgaattaccgtattgccctctcgtaccgatctgccaaggcacttgttgagatgcagaactggagggcattgttagaaaatgaccagttaaggatagagcagaaaagagggcgtgtttttgtgggatggaatgaaggaaagatttacttcccaccaacatacaagtattcaactaattcagacagatatgccggggatgagatgcacccaaaggagaaacggcgaactcctgcctggtgtgaccggatattgtggtatggagaaggcctccaccagttatcttatgttcgtggtgaatctaggttctcagatcacagaccagtttatggtatattttgggctgaggttgagtcaagtcatggccgattgaagaaaagcatgagttactctagttcaaggattgaggtagaggagcttttgccatatgcgcatggatacacagagctaaattttttctgaaggatgagggaatggttatgacccacattctaaagactgtaagtatcttttggagagatttcaacctgcttctgcatatcagcaataatgtgctttctgagtcaatcaggtaggaatctcttttgaggacattcattcttaagggtgatggagacattccgttgcccactaaccaaaaaaggtgtaaattttgtaattgattggttaactaactccacccatcgactaattccgcctcctcaatcataacactgttaactttgcaacataccagtctcagaacaaggcataattaagttaactgtttaacaaacaccctcttctatggcatctcaaagctccgtacgagtattgttaattcttcacaatgattaggctgaacttgcactatcaggaactgccaaagtgggtacttgaagattgttttattcatgatgattcttttgttagttttagggaatttttttgatgagctaaagacaatgaagtatggtcaatataatcattaggctacttacgttttgttttaaatgcaaagagaagtaaaggtttgatggatactcattaccaaagtgatagaggaaatgtaaaagaaagaagaacaaaaaaaagaagaagaagttataatagaaaccaggatgcttcttttctcccactgcttttgctaatgattttactggaaagaggttgtttccttgataatctagcagctgcactgccatttacttttctttttctactgtggtgtgagtagcaaaccagaaaaagcagcagacagttttggcaggcttggcaggttttatggaagccacgattaagagacttctctgtcgaaagagtttttttttttatgttcacctttgtcctctgatgcgtgcaccagatcattagtttgttcttacctgtgtggaatgcagagaaagtaaaacaagtgtggga

SEQ ID NO: 1902 - DNA, 1759 bp, Lotus japonicus
ttttgtgtgtttggcatttgatgaagctctcatggtccaagagaatggtcagaaagttcttcaatctcaaaagcaaagctgaagaatcccaccaagctggtgatgttgcttatggaggaggtgatgtagattacagaagcaggagcagcttatctgagagagagcaatgcacaatcaaaaagagcaaaacagagaagttgagcaggaactcatcgcaggccaggcgaggaaaaatgaaccttgaccatcctagaattatagatgtccacaactatagcattttcactgctacatggaatgtggctggaagatccccaccaagtaacttgaatttagatgatttgcttcatgcctcaccgcctgcggatatttatgttcttggatttcaagagatagttcccttgaatgctggtaatatcttaggcgccgaagacaatggccctgccaaaaagtggctatcgctcattggaaagactttaaacaatcttcctggttctagcggatgcaacgggtattatacaccatcgcccattcctcagccggtggtagaattaaatgccgattttgaaggatcagctaggcagaagaattcatcattcttccaacggcggtcattccagacaacgtctagtaactggggaatggacaatgatccgtcaactgcactaccacgtctagatcggagattcagtgtctgcgatcgtgtaatttttggtaacaggcgaagtgactttgatcccagtttccgatggggttacaggcctagtgactattcaagggcaagtgactactccagacccagtgactattcaagaatgggttcatctgatgatgacaatggccttggagattctccaagtacagtcttattttcaccaatgtcttatggtggacctgcatctgctgaagatgtatacggcgtgcaagggcgtccgaggtactgcctttttgcaagtaagcaaatggtgggaatatttctcaccatatgggtgagaagtgaattgaaggatcatgttagaaacttgaaagtatcatgtgttggcagaggattgatgggttatctcggaaataagggatccatctcaattagcatgtctctgcacgaaacaagcttttgcttcatttgtagccacttaacctcaggacagaaagagggagacgagctaagaagaaattctgatgtgatggagattcttaaaaagacaagatttccacgtgttcacggtgctgacaatgagaagtctccagagacaatcctggagcatgatcgaattatatggcttggagatttgaattatcggattgccctctcctaccgtactgctaaggcacttgttgagatgcaaaactggagagcattgttagagaatgaccagttgagaatagagcaaaagagaggtcgcgcatttgtgggatggaatgaagggaagatttatttccctccaacatacaagtattcaactaattcagataggtatgcaggagatgacatgcaccctaaggagaaaaggcgaacacctgcttggtgtgaccgtattttgtggtatggagaaggtctccatcaactatcctatgtccgtggggaatcaagattctcagaccacaaaccggtttatgccatattttgggccgaggttgagtcaaatcatggaagattaaagaaaagtatgagctgttctcgttccagaattgaggtggaggaacttttaccatattcccacggatacactgaactcagctttttctaaaggaaggagga

SEQ ID NO: 1903 - DNA, 2406 bp, Lupinus angustifolius
tctctctctctctctttcattcacgttcttacacttttaagagtgacacatacacatagttatcacgacaagggaaagaaataaaaccttatacaccacatcagcttcttcttctttcacaagtagagatttttttgtgacccttctatctaaggtacttgagaagctgtatgaagtacaagtttaacaatgagagatgataattccaataaaagcaagctctcatggtccaagagaatggtcagaaagttgttcaacatcaaaagcaaaagcgaggactcaccacatcaaccagaagatggtgttgcttataatggaggaggtgatgtgcaatacagaagacggaacagcttttccgagagagagccatccacaataaaaaagagcaaaacagaaaagtttagcaggaattcggagcgggttaggcgagcaagaatgaatcttgaccatcctcgaattgttgatgtccagaactatagcatttttgttgctacatggaatgtaggtggaagatccccatcaagtaatttgaatttggatgattggcttcacgcctcagcacctgcagatatttatgttcttggatttcaagagatagttcccttgaatgctggtaatatcttaggggcagaggacaatggccctgccaaaaaatggacagctctcattcggaaaactttgaacaatcttcctggtactagtggaggtggtggttattatacaccatctcctgttcctcaaccagttgcagaattaaatgcagatttcgagggatcagctaggcagaagaattcttctttcttccaccggcgatcattccaaacatcgtctaacagctggcggatggacaatgacccttcaactatgcagccgcaactagatcgaaggttcagcgtctgtgatcgtgtaattttcggtcacagaccaagtgactttgatcccagtttaagatggggttataggcctagtgactactcgagggcaagtgattattccagggcaagtgactactctagaccgagtgactactctagaccgagtgactattcaagatggggttcacctgatgatgacaatggccatggagattcgcccagtacagtctcattttcaccaatgtcttatggtggacccacctctaatgaagatgggtatggcattccagggaattcgaggtactgccttgttgcaagtaagcaaatggtcggaatttttcttactgtgtgggtgagaagtgaattgaaagatcatgtccgaaacatgaaagtatcatgtgttggcagaggattgatgggttatcttggaaataagggatccatctcagttagcatgtctctacatgaaacaagcttttgcttcgtttgtagccatttaacctcaggacaaaaagagggtgacgagctaagaagaaattctgatgtgatggagattcttaaaaagacaaggtttccccgtgttcatggtgcaggcaatgagaagtctcctgagacaatccttgagcacgatcgaattatatggcttggagatttgaattatcggattgccctctcctaccgttctgctacagcactcgttgagatgcagaattggagagcattgttggagaatgatcagttgagaatagagcagaaaagaggccgtgcatttgttggatggaatgaagggaaaatttattttcctccaacatacaagtattcaactaattcagatagatacgccggaggcgatatgcacccgaaggaaaaaaggcgaacacctgcttggtgtgaccgtattttgtggtatggagaaggccttcatcaattatcttatgtccgcggagaatcaaggttttcagaccacagacctgtttatggcatattttgggctgaggttgagtcaagtcatggaagattgaagaaaagtatgagctgttctcgatcccgaatcgaggtggaggaacttctaccacattctcgtggatatacggaactaagctttttctaaaggaatgaaaggatggccagaaactggtcaacaagagggaggttaaagtttgaagagattcatctatatataagttgatagagacaacccaattcccaaataccgaaaaaggtgcaaatatgtaattttgttctatacttcagtcatgctttgcaatacactattaggaaaggaggaagatgatttttttattcatgaagaaatttttgttttttttttaagaatatttatgatgactgaatgaaggtgaaaagatcatcaagtaatcattagggtacaaactttttttgtttctagcttaaaaaagattagagttttgatgtatactgattgctacagtgatgtaaaagaaattgtataaagaggaaaaaatgaaaattataattaattaatgatagaatcatactgttattttgtcca

SEQ ID NO: 1904 - DNA, 2648 bp, Gossypium raimondii
tagagtgaaggagggagtttctctctctagtgcactttattctgtcgatactttgctgttttactgagaacgaggctcgctttgtttaacaaagaaagggggctgccttgttctttctttcttcctctttctttatgtctgccgcattgtcttgttctacttcaggaatctgccttctcttcccatctcacttccacgcattaaagtgctctttcttgctgtagtcgttggaccttcattttctcagagctgggatttccgggaatagtaaagagcaatttaggaactgtatgaagtagaagtctaacaatgacagatgggaaaccaaagaaaagcaagctctcatggtccaaaaaaatggtcagaaaatggttcaatatcaaaagcaaaactgaggactttcaagcagatgatcatgtttatggaggttcttttcatcaaacttcaggaggtgaagtggaatacaggactagcttctcagaaagggagccatgcacaataaaaaagagtaaaacagaaaaatttagtaagaatacagaacaaagcaggcgagggagaatgaatctcgatcaccctcgaatcatagatgtccaaaattatagcatttttgtagctacatggaatgtggctggaagatccccacctagtaatttgaatctagaagattggcttcattcctctcctcctgcagatatatatgtcttagggtttcaagagatagttcctttgaatgctgggaatattttgggggctgaagacaatggtccggccaaaaagtggttgtctctcattagaaagactctaaataatcttccaggaactagtggaggagggggttgctatacaccatctcctgttccacagcccattgttgagatggatgcggacttcgaggggtcatctaggcagaagaattcatctttctttcatcgccgatcatttcaaacaaccaacagctggagaatggacaatgacccctccatttcacaaccacgacttgacagacgatttagtgtttgtgatcgggtaatatttggtcataggccaagtgactatgattccagttatagatggggtaacaggcctagtgattactcccggcctagtgattactccaggccaagtgattactccagatggggttcttcagatgacgataacgggattgcagattcacccagtactgtattgtactctccaatgtcctatggtggatctgcatcaaatgaacaaggatataggatgacgggacattcaaggtactgtttggtggctagtaagcaaatggttggcatatttctcacaatttgggtgagaagtgaattgagagatcatgttaaaaacatgaaagtatcttgtgttggcagaggactgatgggttatcttggaaataagggttctatatctgttagtatgtcggtgcatcaaacaagcttttgcttcatctgtagccatttaacttctgggcaaaaggagggtgatgagctaagaagaaactctgatgtcatggagattcttaagaagacgaggtttccaccagttcataatgcagctgatgagaagtctcctgaaacaatccttgagcatgatcgaataatttggcttggggatttgaactaccgaatctccctctcttatcggtcggccaaggcacttgttgagatgcagaactggagggcattgttagaaaatgaccagttgaggatagagcagaaaagaggacgtgcttttgtgggatggaatgaaggaaagatttacttcccaccaacatacaagtattcaactaattccgacagatatgcaggagatgatatgcacccaaaggagaaacgccgaactcctgcttggtgtgaccggatattgtggtacggggaaggcctccaccaattatcttatgtccgtggagaatctaggttctcagatcaccgaccagtttacggtatattttgggctgaggttgagtcaagccatggccgattgaagaaaagcatgagccactctagttcaaggattgaggcagaggatcttctgccatatgcgcatggatacactgagttaaatttcttctgaagagtgagggccctcgctgaagtaaatatcttttggagaaatttcaaagcccttctgcatatcagcaataatcttgcattctgaaatcatccaggaatttactttggggctttcattattaaaggtgatggcgacattcctttgctctttaaaccaaaacaaggtgtaaattctgcataaatacgacgttagcttacaaataccggtctcggtgcaatgcatagttaactgatatacaagcacccacttttcctttccccttattattcataattaccaggtactgtatatacatacacacttcatttctggtgattacatctttatacttcaaaagtagaaagataaacttatgtgataatgatacgagcttttgatgtttttgaggggtgaagttggtgtatcaagaactgcccgaagtgggtagttgaagattgttttattgatgatgattcttttgttaagtaattctttttagcagctaaagatgatgaagtacggtgcttactttttgttttaaattccaaagaaaagtaaaggtttgataatactcattaagtgatagaagaaatgtaacc

SEQ ID NO: 1905 - DNA, 3014 bp, Glycine max
tggatatctagtccaaataaatacatatattcagaaccaccctttttatctttttcctcgttcaactgcttttgctttggttggaagaccaaaacgggaagaaagattacagcgataagatactgctagatctcactcactttgctgaccaggggcagcctttgttcatctgaccggaacgaaacgacctgcccgttgcccccttcatgtttgccttgtcttcaactgagagaacgaggcactatgtttccaagagagagaaacactgcttgaagctctctctctctctctctttgtttgcctgtcgcagcattgtcttgttccacttcagagtcacatctcacttccacgcattaaagacttaaaaggttgaaaagcttagcacccggatgcgagcctgttcttgtttctacacactcaaacaaagagagagaggctgaaaatcggagaaaggggtttcacaagaaagagaattttgtttctaattgttgagtagctcttggagtacaacatagcatacttgaggagctgtatgaggtagaagattaacaatgagagatgagaattccaagaaaagcaaggtttttctttttcacactcttgactcaattctgctcctgctgaaagatgatttcttttttcttctttcttttattttttgttgttctcctgagaaatgaaattcaacattttgcgtcttccaatttttggcaatttcttgactgctttgttgtgtattttgtttgttcttgtgaagctctcatggtcgaagagaatggtcagaaagttcttcaatgtcaaaagcaaagctgaggactcctaccagtcaaatggtgttgcttatggaggaggtgacgtagaatacagaagcaggaacagcagcttctctgagagggagatcaaaaagagcaaaacagacaagtttagcaggaacacggagcaggttaggcgaggaagagtgagtctcgaccatcctcgaattattgatgttcataactatagcatttttgttgcttcatggaatgtggctggaagatccccaccaagtaatttgagtatagatgattggcttcatgcctcgccaccggcagatatttatgttcttggatttcaagagatagttcccttgaatgctggtaatatcttgggcgcagaagacaacggacctgccaaaaaatggctagctctcattggaaagaccttaaacaaccttccgggtactagtggaggtggtgggtattatacaccatctccaatccctcagccagtggtagaaataaatgcagattttgagggatccgctaggcaaaaaaattcatcattcttccatcgccggtcgttccagacaacttctagcggctggggattggacaatgattcttcaactatgcagccgcgactagatcgaagattcagcgtctgtgatcgtgtgatttttggtcacaggaaaagtgactttgatcccagctatagatggggttataggcctagtgactattccagggcaagtgactactccagacccagtgactattcaagatggggttcatctgatgatgacaatggccttggagactcgccaagcacagtctcaccactgtcttatggtggacctgcctctgctgaagatggatatggaatgccagggcgttccaggtactgccttgttgcaagtaagcaaatggtaggaatatttctaaccatatgggtgagaagtgaattgaaagatcatgtgcgaaacatgaaagtatcctgtgttggcagaggattgatgggctatcttggaaataagggatccatctcaattagcatgtctctacatgaaacaagcttttgcttcatttgtagccacttaacctcaggacaaaaggagggtgatgaattaagaagaaattctgatgtgatggagattcttaagaagacaaggtttccacgtgtacatgatgctgacaatgagaagtctcccgagacaatactcgagcatgatcgaattatatggcttggagacttgaattatcggattgccctctcctaccgttctgctaaggcacttgttgagatgcaaaactggagagcattgttggagaatgaccagttgagaatagagcagaagagaggccgtgcatttgtgggatggaatgaagggaagatttatttccctccaacatacaagtattcaactaattcagataggtatgcaggagatgatatgcacccaaaggagaaaaggcgaacacctgcttggtgtgaccgtattttgtggtatggagaaggtctccatcaattatcttacgtccgtggagaatcaaggttttcagaccacagaccggtttatggcatattttgggctgaggttgagtcaagtcatggaagactgaagaagagtatgagctgttctcggaacagaattgaggtggaggaactcttgccatattcccacggatatactgaactaagttttttctaatggaatgaggactagctatgggatttcagcacctggtcaacaagagggagtcacctcactttgaagaattttatccgtggagactgatagagacaacccatttcccacataccgaaaaagccatgctatgccatgcctaacacatgatcagtacacagttcctcatcatcatctcgttagccactgtgcaagtgtgcattgtttgatagccaattaacaaacactcaactttacaatgtctcaaaactccgtacttcattggcagtcttgcacaatcattaggaggcggaaggagaccattttttatttaattaatcattctttaattgtttttggagaatattcatgatgactgaatgaagctgaaaagatcgtcaaaataatcattagggtactaactctttttttttggttttaagtgcagagaaaatgagaattttgattatactccacttattgattgctacagtgatgaaaaagaaattgtacaaaaaaaatcttgttaattaatgatagaattccagagcctccactccttagttcctga

SEQ ID NO: 1906 - DNA, 2191 bp, Manihot esculenta
atgagagatgggaactccaagaaaagcaagctctcatggtccaaaaaaatggtcagaaagtggttcaatatcaagagtaaaactgaggacttccaagcagatgatgtttgtggaggcgttgaagtggaatacaggactagcttctctgaaagggagccgtgcactatcaagaaaagtaaaacagagaaatttagcaagaatcctgagcaggtccggctgggaagaatgaatcttgaccatcctcgaatcatagacgtgcaaaactacagcatttttgtagctacatggaatgtggcaggaagatccccaccacgtaatttgagtctcgatgactggcttcatgcctcacctcctgcggacatatatgttcttggatttcaagagatagttcctctgaatgccggtaatgttcttggtgcagaagataatggcccggccaaaaaatggctggcccttattagaaagactctaaacaatcttccaggaactagtggcagtggtgggtgttatacgccatctccaattcctgaaccaattgtagaaatggatgcagattttgagggatcatctaggcagaagaactcgtcgttctttcataggcgatcattccagacacctcacagctggagaatggacaatgacccttcaattccacaaccaagacttgatcggcgattcagtgtttgtgaccgagttatatttggtcacagaccgagtgactacgatcccagttatagatggggtcacagacctagtgattattcaagacctagtgactactccagacctagtgattactcaagatggggttcatcagatgatgataatggcccaggggattcacccagtactgtattgtactcaccaatgtcatatggtggttcctgcagtgggtctacatctatggaagatggatataggaggccagggtattcaaggtactgtttagtggcaagtaagcaaatggttggcatattcctcacaatatgggtccggagtgaattgagagatcatgttcgcaacatgaaagtttcttgtgttggcaggggcttgatgggttatcttggaaataagggatctatttccgtcagcatgtccttgcatgaaacaaccttttgtttcatctgtagtcacctaacctctggacagaaggaaggtgatgagctaagaaggaatgcggatgtgatggagattctgaagaagacaagatttccacgtgttaacagtgcagctgatgagaagtccccagaaacaattcttcagcacgaccgagttatttggcttggggatttgaattatcgcattgccctttcttatcgatctgctaaggcgctagttgagatgcaaaactggagggcattgttggagaatgaccaggcatagcagagaagaggtcgtgtttttgtagggtggaatgaagggaagatttatttcccacccacatataaatattcaactaattcagacagatatgcaggagatgatatgcacccaaaggagaagcgtcgaactccagcttggtgtgatagaattttatggtatggagaaggcatccaacaattatcttatgtacgtggggaatctaggttctcagatcataggccagtttatggcatattttgggcagaggttgagtctagccatggccaattaaagaaaagtacgagctactccagttccagaattgaggtagaggagctcttgccatactcacatgggtacacagaactaaactttttctgatggataaggagatagctatgacccacattaggcggtaatcactttgaagaaaaattttccttgaagggtgataaaggcattctgttgcccactaaccgaaaaaggtgtaaatttttgtaatttggtcagtcaatcaactccatacatcatcaaatcattgtaacttcaaaaatcaaatgtagttagcactaacaaaccagtttctgtttggtgcatgattcactaacccaattaatgaacacccgactttctggcaaagtttgctgctgtatttcacagtccttcaatgatatgattaggatgaatgtaactgtcaggaactgccaagtgggtgtccagggaataagttactaaattctttcttagtttagggaactttttggttttttgatgattgaaagaagaagagagatgatggtcaatataatcatttgggtatttttctttt

SEQ ID NO: 1907 - DNA, 2548 bp, Citrus sinensis
tttttgttgattctatgctaactgggaagtgggaaagggttaaaagagagagccttatatgaagttgaagtgattgattgaaacaatgagagatggcaactctaagaaaagcaagctctcatggtccaagaaaatggtcagaaagtggttcaatatcaagagcaagactgaggaatttcaagcagatgatcctgtttacggaggaggtgatcaagttgaatataggaccagcttctcagagagggagccttgcacgatcaaaaagagtaaaacagagaaatttagcaaaagtggggagccagttcggcgagggagaatgaatcttgaccaccctcgaataatagatgtgcagaaccatagtgtttttgttgccacatggaatgtggctggaagatccccaccaagtaatttgagccttgatgattggcttcatgcctcaccgcctgcagacatttatgtccttggatttcaagagatagttcccctaaatgctggtaatgttctcggggcagaagacaatggccctgccaaaaaatggctggctctcattcgaaagactcttaacagtcttcccgggacaagtggaagcagtggttgttatacacagtctcccattcctgagcctattgtagaaatggatgcagattttgagggatcagctagacggatgaactcgtccttcttccatcgtcgatcatttcagacaactcatagctggaaaatggacaatgacccttccattccgcaaccgagacttgatcggagatttagtgtttgtgatagggtgatatttggtcacagaccaagtgactatgatcccagttttagatggggtcacaggcctagtgattactcgagacctagtgattactcgaggcctagtgattactcgagatggggttcatctgatgatgataatgggcctggtgattcaccaagtactgtattatactcgccaatgtcttacagtggatctggatccatggaacatggttataggatgcctgggaattcaaggtattgcttagttgccagtaagcaaatggttggcatatttctcacggtttgggtgaggagtgaattgagagatcatgttaaaaacatgaaagtatcttgtgttggcaggggtttaatgggttaccttggaaataaggggtcgattgcagttagcatgttattgcaccaaacaagcttttgctttatctgcagtcacttaacctcaggacagaaggagggggatcagcttagaaggaatgctgatgtaatggagatcttaagaaagacaaggtttcctcgagttaatagtgcgggtgatgaaaaatcaccagaaacaatccttcagcatgatcgagtgatttggcttggggatctgaattatcgcattgccctcaattaccgatctgccaaggcacttgttgagatgcaaaactggagggtattattagaaaatgatcagttacggaaagagcagagacaaggccgtgtttttgtgggatggaatgaaggaaaaatttattttccaccaacttacaagtattcaactaattcagacagatatgcaggagacgatatgcacccaaaggagaagcgtaggacacctgcttggtgcgatcgaattttgtggtatggagaagggcttcaccaactatcttatgtacgtggcgagtctaggttctctgatcatagaccagtttatggtatattctgggctgaggttgagtcaagtcataacagattaaagaagagtattagctattctagttccaggattgaggtggaggagcttttgccatactcacatggctacaccgaactaaactttttttgaaggaggggaaggggatagttatgatccatatgcaagtatgctctgtctcgttacgtgtgcttttcagcaaccaagtgatttcaatgggttgtaaccaggttgtaaatatcagtggaaaattttttatgtctttctgcatatcaagtatggcttgcatcctcaatcaatcaggccggaatcacttcaaagaccttcatccttgtggggtgatggaggcattccattgctcactaaccaaaaaagatgtaaattttgtatttgactggatgactaacgccaaagatagccaactcaaatgtaccttttgatcatcatacattgttagcaaattaacaaacatgcaccttcttggcattcaaaagttttctgcaccagcgtttgcattctggcacgataaagggtactttaattttgaacttagtggttatctctttacttaaaagttaatgataacttccctaccttataatgatcaagcttttgtgttttgcaggatgaactcacactttagaagccaagtgggtagatgaggattattttgttcatgattcttttgttagtttaggacatttttttatgactgaaagaaggtgaaagatggtcaatttaatcatttgtgtacttacattttcttttaaatgcaaagaagtaaagattccatggatactcaattaccaaagtgatggaaaaaaaaaacatcattaaaaatcgattttagtt

SEQ ID NO: 1908 - DNA, 2548 bp, Citrus clementina
tttttgttgattctatgctaactgggaagtgggaaagggttaaaagagagagccttatatgaagttgaagtgattgattgaaacaatgagagatggcaactctaagaaaagcaagctctcatggtccaagaaaatggtcagaaagtggttcaatatcaagagcaagactgaggaatttcaagcagatgatcctgtttacggaggaggtgatcaagttgaatataggaccagcttctcagagagggagccttgcacgatcaaaaagagtaaaacagagaaatttagcaaaagtggggagccagttcggcgagggagaatgaatcttgaccaccctcgaataatagatgtgcagaaccatagtgtttttgttgccacatggaatgtggctggaagatccccaccaagtaatttgagccttgatgattggcttcatgcctcaccgcctgcagacatttatgtccttggatttcaagagatagttcccctaaatgctggtaatgttctcggggcagaagacaatggccctgccaaaaaatggctggctctcattcgaaagactcttaacagtcttcccgggacaagtggaagtattggttgttatacacagtctcccattcctgagcctattgtagaaatggatgcagattttgagggatcagctagacggatgaactcgtccttcttccatcgtcgatcatttcagacaactcatagctggaaaatggacaatgacccttccattccgcaaccgagacttgatcggagatttagtgtttgtgatagggtgatatttggtcacagaccaagtgactatgatcccagttttagatggggtcacaggcctagtgattactcgagacctagtgattactcgaggcctagtgattactcgagatggggttcatctgatgatgataatgggcctggtgattcaccaagtactgtattatactcgccaatgtcttacagtggatctggatccatggaacatggttataggatgcctgggaattcaaggtattgcttagttgccagtaagcaaatggttggcatatttctcacggtttgggtgaggagtgaattgagagatcatgttaaaaacatgaaagtatcttgtgttggcaggggtttaatgggttaccttggaaataaggggtcgattgcagttagcatgttattgcaccaaacaagcttttgctttatctgcagtcacttaacctcaggacagaaggagggggatcagcttagaaggaatgctgatgtaatggagatcttaagaaagacaaggtttcctcgagttaatagtgcgggtgatgaaaaatcaccagaaacaatccttcagcatgatcgagtgatttggcttggggatctgaattatcgcattgccctcaattaccgatctgccaaggcacttgttgagatgcaaaactggagggtattattagaaaatgatcagttacggaaagagcagagacaaggccgtgtttttgtgggatggaatgaaggaaaaatttattttccaccaacttacaagtattcaactaattcagacagatatgcaggagacgatatgcacccaaaggagaagcgtaggacacctgcttggtgcgatcgaattttgtggtatggagaagggcttcaccaactatcttatgtacgtggcgagtctaggttctctgatcatagaccagtttatggtatattctgggctgaggttgagtcaagtcataacagattaaagaagagtattagctattctagttccaggattgaggtggaggagcttttgccatactcacatggctacaccgaactaaactttttttgaaggaggggaaggggatagttatgatccatatgcaagtatgctctgtctcgttacgtgtgcttttcagcaaccaagtgatttcaatgggttgtaaccaggttgtaaatatcagtggaaaattttttatgtctttctgcatatcaagtatggcttgcatcctcaatcaatcaggccggaatcacttcaaagaccttcatccttgtggggtgatggaggcattccattgctcactaaccaaaaaagatgtaaattttgtatttgactggatgactaacgccaaagatagccaactcaaatgtaccttttgatcatcatacattgttagcaaattaacaaacatgcaccttcttggcattcaaaagttttctgcaccagcgtttgcattctggcacgataaagggtactttaattttgaacttagtggttatctctttacttaaaagttaatgataacttccctaccttataatgatcaagcttttgtgttttgcaggatgaactcacactttagaagccaagtgggtagatgaggattattttgttcatgattcttttgttagtttaggacatttttttatgactgaaagaaggtgaaagatggtcaatttaatcatttgtgtacttacattttcttttaaatgcaaagaagtaaagattccatggatactcaattaccaaagtgatggaaaaaaaaaacatcattaaaaatcgattttagtt

SEQ ID NO: 1909 - DNA, 3014 bp, Gossypium raimondii
aggtgtgctgctgctctctttatttttctaacaaagtaaagagaaggaagagagagagagagaaggggctgctttgcctttgcctttgcttgtgtttgtcttacgagctttctctctctagactttcttccccttgctttctctttatgtttgcccacattgtcttgttatagcttcaagaatctcccttctcttcatattatttcctagcattaaagtgttgtctctatctctctctttttcttttatattagtcgttggagcttcatgttttctgggttttttgagcttgtttctttgctttcacttactgggaacaagaaactaaggcaaacccatttcttgtttagctctctttgctttagctttagcctttgattttgaggaaggtgaaggtaggggacttgggacatttgttttcttagttgaagattatctgggatcaaataattcagcttgtttttaatctaagttaaaaaaggcctgaaatcggggaaggatcggtggagtttgctgcctatatggggttgtagtaagtagcaacagtgtttttttttcttggtgattgttagcaaagttgagagtttcgggaatagtaaaaaagagtaaatttggaggtgtatgaagcaaaagtccaacaatgagagatgggaaagccaagaaaagcaagctctcatggtccaaaaagatggtcagaaaatggttcaatatcaagagcaaaactgaggattttcaagcagatgatcatgtttgtggaggaggaggtgaagtggaatacaggactagcttctcagaaagggagccatgcacaatcaaaaagagtaaaacagaaaaatttagtaggaatacggagcaaagtcggagccggagagggagaatgaatcttgatcaccctcgaatcatagatgtcgaaaattatagcatttttgcatctacatggaatgtggccggaagatcgccaccgagtaatttgaatctagaagatttgcttcatgcatcatctcctgcagatatatatgtccttgggtttcaagagatagttcctttgaatgctgggaatattttgggcgcagaagacaatggtccggccaaaaaatggttgtctctcattaggaagactcttaacaatcttcccggaacaagtggaggtgggggttgctatacaccatctcctgttcctcagcctattgtggagatggatgctgattttgaagggtcatctaggcagaagaatccgtctttctttcaccgcagatcgttccagacaaccagcagttggagaatggacaatgatccctcgattccacaaccacgacttgacaggcggttcagtgtttgtgatagggtaatatttggtcataggccaagtgactatgattctagttatagatggggtaataggcccagtgattactcccggcctagcgattactctagacctagtgattactccagatggggttcatcagatgatgataatggaatcacagaatcaccaagtactgtattgcactcgccaatgtcctatggtggatctgcatcgaatgaaccgggatataggatgcctggacattcaaggtactgcttagtggctagtaagcaaatggttggtatatttatcacaatttgggtgagaagcgagttgagagatcatgttaaaaacatgaaagtatcttgtgttggcagaggattgatgggttatcttggaaataagggttctatatctgtcagtatgttggtacatcaaacaagcttttgcttcatttgcactcatttaacttcgggacaaaaggagggtgatgagctaaggagaaactcggatgttatggagattcttaagaagacgaggtttccacgggttcatagtgaagctaatgagaagtcccctgaaacaatcctcgagcatgatcgaataatttggctcggggatttgaattatcgtattgctctctcttaccggtctgccaaggcacttgttgaaatgcagaactggagagcattgttagaaaatgaccagctaaggatagagcaaaaaagagggcgcgtttttaagggatggcatgaaggaaagatttacttcccaccaacatacaagtattcaactaattcagataggtatacaggggatgctatgcacccaaaggagaaatgtcgaactccagcttggtgtgaccggatactgtggtacggagaaggtattcatcaattatcttatgtccgtggggaatctaagttctcagatcacagaccggtttatggtatattttgggctgaggttgagtcaagccgtggtcaacttaagaagagcatgagttattctagttcgaggaggattgaggtagaggagcttttgccgtatgcgcatggatacaccgagctaaattttttctaaaggaggttacgacctgcattcaatgagcttaaatatcaattggcaagaatttcaatgtgcttctacccatcagcaataatttgtcttctgaatcaatcaggtaaaattcactttgaggagatccatttttgagggtgatagagacattcctttgctcactaaccaaaaaaaggtgtaaacttaactaacttgaattccaactcaatcataacatgatgtcagcttacaacattccaatctcaatgcaactgattaacaaaaaagtccacttctaatccatctcgaaacaagctccgatagttctccacaggaaaagaagttgagagagggtacttgaagattgttttattcatgatttgtttagttttaggggaaatattcttttgatgaactaaagaaaagatgaaagtatggtcaaatatataatcattatatgtttgttaactttttgttttaaatgcaaagagaagtaaagggttttatggatacttaccaaagtgatagaagaattaaatgtaaagagaaaaaacaaaagtgaaaaaaatagaatcagaatatgctttgtttcttctccatgctgcttttgctaatgattttactgagaaaagttggtttcattgat

SEQ ID NO: 1910 - DNA, 2782 bp, Gossypium hirsutum
ctgctgctctctttatttttctaacaaagtaaagagaaggaagagacagagagagagagagagagagagagaaggggctgctttgcctttgcgcttgcttgtgtttgtcttacgagctttctctctctagactttcttccccttgctttctctttatgtttgcccacattgtcttgttatagcttcaagaatctcccttctcttcatattatttcctagcattaaagtgttgtctctatctctctctttttcttttatattagtcgttggagcttcatgttttctgggttttttgagcttgtttctttgctttcgcttactgggaacaagaaactaaggcaaacccatttcttgtttagctctctttgctttagctttagcctttgattttgaggaaagtgaaggtaggggacttgggacatttgttttcttagttgaagattatctgggatcaaataattcagcttgtttttaatctaagttaaaaaaggcctgaaatcggggaaggatcggtggagtttgctgcctatatggggttgtagtaagtagcaacagtgtttttttttcttggtgattgttagcaaagttgagagtttcgggaatagtaaaaaagagtaaatttggaggtgtatgaagcaaaagtccaacaatgagagatgggaaagccaagaaaagcaagctctcatggtccaaaaagatggtcagaaaatggttcaatatcaagagcaaaactgaggattttcaagcagatgatcatgtttgtggaggaggaggtgaagtggaatacaggactagcttctcagaaagggagccatgcacaatcaaaaagagtaaaacagaaaaatttagtaggaatacggagcaaagtcggagccggagagggagaatgaatcttgatcaccctcgaatcatagatgtcgaaaattatagcatttttgcatctacatggaatgtggccggaagatcgccactgagtaatttgaatctagaagatttgcttcatgcatcatctcctgcagatatatatgtccttgggtttcaagagatagttcctttgaatgctgggaatattttgggtgcagaagacaatggtccggccaaaaaatggttgtctctcattaggaagactcttaacaatcttcctggaacaagtggaggtgtgggttgctatacaccatctcctgttcctcagcctattgtggagatggatgctgattttgaagggtcatctaggcagaagaatccgtctttctttcaccgcagatcattccagacaaccagcagttggagaatggacaatgatccctcgattccacaaccacgacttgacaggcggttcagtgtttgtgatagggtaatatttggtcataggccaagtgactatgattctagttatagatggggtaataggcccagtgattactcccggcctagcgattactctagacctagtgattactccagatggggttcatcagacgatgataatggaatcacagaatcaccaagtactgtattgcactcgccaatgtcctacggtggatctgcatccaatgaaccggggtataggatgcctggacattcaaggtactgcttagtggctagtaagcaaatggttggtatatttatcacaatttgggtgagaagcgagttgagagatcatgttaaaaacatgaaagtatcttgtgttggcagaggattgatgggttatcttggaaataagggttctatatctgtcagtatgttagtacatcaaacaagcttttgcttcatttgcactcatttaacttcgggacaaaaggagggtgatgagctaaggagaaactcggatgttatggagattcttaagaagacgaggtttccacgggttcatagtgaagctaatgagaagtcccctgaaacaatcctcgagcatgatcgaataatttggctcggggatttgaattatcgtattgctctctcttaccggtctgccaaggcacttgttgaaatgcagaactggagagcattgttagaaaatgaccagctaaggatagagcaaaaaagagggcgcgtttttaagggatggcatgaaggaaagatttacttcccaccaacatacaagtattcaactaattcagataggtatacaggggatgctatgcacccaaaggagaaatgtcgaactccagcttggtgtgaccggatactgtggtacggagaaggtattcatcaattatcttatgtccgtggggaatctaagttctcagatcacagaccggtttatggtatattttgggctgaggttgagtcaagccgtggtcaacttaagaagagcatgagttattctagttcgaggaggattgaggtagaggagcttttgccgtatgcgcatggatacaccgagctaaattttttctaaaggaggttacgacctgcattcaatgagcttaaatatcatttggcaagaatttcaatgtgcttctacctctcagcaataattttttttcttgaatcaatcaggtaaaattcactttgaggagatccattcttgagggtgatagagacgttcctttgctcactaaccaaaaaaaggtgtaaacttaactaacttgaattccaactcaatcataacatgatgtcagcttacaacattccgatctcaatgcaactgattaacaaaaaagtccacttctaatccatctcgaaacaagctccgatagttctccacaggaaaagaagttgagagagggtacttgaagattgttttattcatgatttgtttagttttaggggaaatatt

SEQ ID NO: 1911 - DNA, 3034 bp, Ricinus communis
caaattcgatactttgctgttcactgagaacgaggctgtttctttcttttgtttcaaagagggaacatagagagagagtgtgtgaaagatataaggcttcttcctttctttctctgcatttgcattttctctgtccaaaatttgctttctttctttctctctatatgtctgctacattgtcttgttctacttcaagaatctctcatttcacttctcacacattaaaagtgtttgtctctctcgactaattgcatactcataatttttgggtgttatttcttttagcttcattgctctttaacttaagggtgttttcatattcataaagaagaaaccaagaaaaaaaagaaaaaaagaaaagaaatacaattggctgtttggttttgtccctggtttcattctttggccttatccttggtagttccagcagttttcagtcaaaagcaagacacctgtttgttgattggtctatttagttgagtttttcagttctttttttggttgcattgggaggtcttttggagtttatagagagtaaagattcgtgctttgttggtctcttcttgtcacaaagcttgttgtaagaaaaacccagaatttgaggctggagatggaattctatttctttagtttctgaagttggtgatactaaaaacttgagggggggttgctgaaagtacaaggagagctatatgaaagtattggtgaaaaatgagagatgggaactccaacaaaagcaagctctcatggtccaaaaaaatggtcagaaagtggttcaatatcaagagtaaaattgaggacttccaagcagatgatgttaatggagcctctcattcttcaggagctgaagtggaatacaggactagcttctctgagagggagccatgcaccatcaagaaaagcaaaacagaaaaattcaccaagaacccagagcaagtccggcgagggagaatgaatcttgaccaccctagaatcatagatgtgcagaaccacagtatttttgtagctacatggaatgtggctggaagatctccaccaagtaatttgagtcttgatgattggcttcatgcctcacctcctgcagatatatatgttcttggatttcaagagatagttcctttgaatgctggtaatgttcttggtgctgaagacaatggtcctgccaaaaaatggttggccctcattagaaagactttgaacaatcttccaggaactagtggcagtgggggctgttatactccctccccaatccctgaaccaattgtagaaatggatgtcgattttgaaggatcatctaggcagaagaactcatctttctttcatcgccgatcattccagacaccatacagctggagaatggagaatgatctttcaattccacaaccaagacttgatcggcgattcagtgtttgtgaccgagttatttttggtcacaggccaagtgactatgatccaagttatagatggggtcatagacctagtgatttttcaaggcctagtgattactcgagacctagtgattattccagatggggttcttcagatgatgataacggaccaggggattcaccaagtactgtgttgtactcaccaatgtcatatggtggttcctatagtggatctgcatctacagaagatggatataggaggccagggtattcaaggtactgtttagtggcaagtaagcaaatggttggcatattcctcacaatatgggtccggagcgaattgagagatcatgttaaaaacatgaaagtttcttgtgttggcagaggtttaatgggttatcttggaaataagggatctatttcagtcagcatgtccttgcatgaaacaaccttttgcttcgtttgtactcatctgacctctggacaaaaggaaggtgatgaactaagaaggaatgcagatgtcatggagattcttaagaagacaagatttcctcgtgttagcaatgcaggtgacgggaagtccccggaaacaattcttgagcacgatcgagttatttggcttggggacttgaattatcgcattgccctctcataccgttctgctaaggcactagttgagatgcaaaactggagggcactgttggagagtgatcagctacggaatgagcagagaagaggtcgtgtttttgttggatggaatgaagggaagatttatttccctcctacgtacaagtactcaactaattctgacagatatgctggagatgacatgcacccgaaggaaaagcgtcgaactccagcttggtgtgatagaattttatggtatggtgaaggcctccagcaattatcatatgtacgtggagaatctaggttctcagatcatagaccggtttatggcattttttgggcagaggttgagtctacccatggccgattgaagaaaagtatgagttactccagttccaggattgaggtagaggagctcttgccatattcacaagggtatacagaactaaactttttctgatggatgaggaaatagctatcaactacagtagttgcaggcgggaatcactttgaagaaaatttttctttgaagggtgatggagacaatccgttgcccactaaccaaaaaaggtgtaaatttttgtaattttggtcagctaattaactgcaacacatcatcaattcattgtaacttcgatcatcaaacaaatttagccactaacattaccagttgctgttcggcgcatgcttcgccaacctgattaagaaacacccaactgtctggcaaagtaccctgtttctcatcactgcattatgatttagggtgtacttgctttatcaggaactgccaagtgggtgtctaaagattaatttattcaattctttcttagtgtagggaaacatttttgtttatttgatgactgaaagaagatgaaagatgatgtcaatacaaatatttgggtactttttgttttcaatgagaaggctagattagatttgatggatattcgttacaaaagtgagaaaaggaaagaaaagaattatatagtattgaagttttattttagattccagaatgc

SEQ ID NO: 1912 - DNA, 3256 bp, Populus trichocarpa
cattcctttatctctttccttctttaactgctttcttttatttttgaagaccaaaatgggaagattagagaagggcaatggctacaggctacagacccacaagaggtactctcaccctctcaacacatttgctgaccgtgggcaggtcttgtttgccgattcttgcaagagatgctgcactgaatgactgcccgtttgtcccatcatgttggctcgccttgaaatttgaagtacttgaaatccaataaaataaaataaaataaaataaggaaaaaggaaaagaaaaaggcagccgttaagaccaagtcttgtgtctcttctctctccaatgctacactttattctgttcaaattcgatactttgctgtttgctgagaacgaggcctctttgtttcaaagggagacagataaagaagctataagctttgtttctcttaatcccctctctgtctaaaaacctttgctttcctttatttctctatctatgtctcctacattgtcttgttctacttcaagaatctctcatctcacttccacgcattaaattgttgtctctcttgactaattgcattctcatattttgtgggtttcttctcgtttcttgttctcaagtgtctcatacagtgcatttacaaagtagtacaagaggaaaccaagaaaactcacttgctgttcggtcccttttggctcatttctagttgaaaccaagaaacccgtttgtggttcggtgtatctggctgggttttggtagctttcagtggttttagagcgtgcagggagtaaagaccttcttgacttgtttcaaagcttgataatagtgtgtggaaggagaattccagttgtggagttctatttctttgagttagtgaccatttttctggtgatattttagtaaagcttgggagctggggaggggcaggaagtaaaagaagagctatatgaattaatagtgaaaaatgacagatgggaactccaagaaaagcaagctctcctggtccaagaaaatggtcagaaagtggttcaacatcaagagcaaaaatgaggaatttcaagctgatgatgttcacgggggtgaagttcagtacaggactagcttctcagagagggagccgtgtacaataaaaaagagcaaaacagagaaatttagcaagaatccagagcaggtccggcggaacaggatgaatcttgaccatcctcgtatcatagacgtgcaaaactacagcatttttgtagcttcttggaatgtggctggaagatcccctctaagtaatttaagtcttgatgactggcttcatgcttcacctccagcagatatttatgttcttggatttcaagagatagttcctttgaatgctggaaatgttctgggtgcagaagataatggccctgccaaaaaatggctggctctcatcagaaagactctaaacaatcttcctggaactagtggaagtggtgggtgctatacaccgtctccaatccctgagccaattgtagaaatagatgctgatttcgagggatcatctagacaaaagaatgcttctttctttcatcgccggtcattccagacaaccaatagctggagaatggacaatgatccttcaattcctcagccacgacttgatcggcgattcagtgtatgtgatcgggtaatattcggtcacaggccaagtgactatgatcctagcaatagatggggtcacagacctagtgattattccaggcccagtgattattccaggcctagtgattactccagatggggttcctcagatgatgataatgggcccggggaatcaccaagtactgttttatactcaccaatgtcaaatggaaattcctattctgcgtctaccgaagatggatataggaggccagggcattcaaggtactgcttagtggcaagcaagcaaatggttggcatattcctgacaatatgggtgaggagtgatctgagggagcacgtcaaaaacatgaaagtttcttgtgttggtagaggattgatgggttacctaggaaataagggatctatttcagtcagcatgtccttgcaccaaacaagcttttgcttcatatgcagccatttaacctctgggcagaaagaaggtgatgagttaagaaggaatgcagatgtcatggagattcttaagaagacaagatttccgcgggttcataactcgggtgatgaaaagtctccagaaacaatccttgagcatgatcgagttatttggcttggggatttgaattatcgtattgccctgtcatatcgagctgccaaggcactagttgagatgcaaaactggagagcattgttagagaatgaccagttaaggatagagcagaggcgaggtcgtgtttttaggggatggagtgaggggaaaatttattttccaccaacctacaagtattcaaccaattcagacagatatgcaggggacgatatgcatcccaaggagaaacgtcgaacaccagcttggtgcgatagaattttgtggcatggagaaggcctccaacaatcatcttatgtacgtggggaatctcggttctcagatcataggcctgtctatggcatattttgggcagaggttgagtcgagtcatggtccattgaggaaaagcactagttattctagttccagaattgaggtagaggagcttttgccgtactcacatgggtacacggaactaaacttcttttgaaggttgatcagattgcgggaatcgctttgaacaaattttgccttgaagggtgatggagacaatccgttgcccactgactgaaaaaggtgtaaatatttgtaattttgccagcaaattaactccacacatcatcaactcagtgtaacttttgatcatcataacgttccagtttctgtttggcacataattgagttaccagattaaaaacacctacctttattgcaaagttttgtgcaagcactatcagtccttcatcatgattcggatgaactcaatcactcaacccatcaggagctgcgaagtagttgactaaaagattgatttattcatgattttttttttgttttagtttaggaaacacttttgatgactgaaagaagatgatacgatcattttggccacttcttttgttttaaatgtagaagcaagtagagatctgatggatattcgttaccaaagctacaggaaaaatttatataatatcgaaatttatgttagacttgggaatgcctcttgctcctgttgttgctaatgatttactgaaaaggatggtttcttga

SEQ ID NO: 1913 - DNA, 2574 bp, Phaseolus vulgaris
ctctgttttttccaagagagagaaacacaactctctctattgctttgcttgtcgcattgtgttgttcctcgtctcagttaaaggcattaaatactaaaagcttctagttggtggcatatttactgggaccttgtttccttgttcttgcatttttaagagtgtggttgtgccatcacaagagagcaaaacacaacaccacactcacctacctattttgttgtctctccttttcttctattctctcaaagaaagaaagagggtggaaatccgaaaaagggatttcacaggaagagaatttagcataaggggctgtgtgaggtacaagattaacaatgggagaccagaattccaaaaaaagcaagctctcatggtcgaagagaatggccagaaagttcttcaatatcagaagcaaagaggaggactccttccaatcaaatggtgttgcttatggaggaggtgaagtagaatacagaagcaggaaaagcttctctgagagagagccttgcacaatcaaaaagagcaaaacagagaagattgggaggaacacggagcaggtcaggcgaggcagagctagtcttgaccatcctcgaattgtcgatgtccataactacagtgtttttgttgctacatggaatgtggctggaagatctccaccaagtaatttgagtatagatgattggcttcatgcctcaccacctgcagatatttatgttcttggatttcaagaggtagttcccttgaatgttggtaatatcttaggctctgaagacaacaaccctgcaaaaaaatggcttgctctcattggaaggaccttaaacaatcttcctggttctagtggaggtggagggtattacacaccctctccactcactcagccagtggtagagttaaatgcagattttgagggatcgtctaggcagaagaatccatcattcttccatcgtctatcgttccagacaagttctagcagctggggaactgacgatgatccttcaagcatgcaacctcaactagatcgaagattcagcgtttgtgatcgtgtaatttttggtcataggaaaagtgatttcgatccaggcttcagatggggttataggccaagtgactactccagagcaagtgactactccagacccagtgactattcaagatggagtttatctgatgatgataatgcccttagagattccccaaacacagtcttgttttcacccttgtctcatggtggacctgccactactgaagatggacatggcaggcactgccttgttgcaagtaagcaaatggtgggaatatttcttaccatatgggtgaggagtgaattgaaggatcatgttaaaaacattaaagtatcatgtgttggcagaggattgatgggttatcttggaaacaagggatccatctcaattagcatgtctctgcatgaaacaagcttttgcttcatttgtagccacttaacctcaggacagaaggaaggtgatgaactaagaagaaactctgatgtgattgagattcttaagaagacaaggtttcctcgtgtccatggtgctgacaatgagaagtctctggagacaatcctccagcatgatcgaattatatggcttggagacttgaattatcgaattgtcctctcctaccgttctgctaaggctcttgttgagatgcagaactggagagcattattggaaaacgaccagttgagaatagagcaaaagagaggtcgtgcattcgtgggatggaatgaagggaagatttatttccctccaacatacaaatattcaactaattcagatagatatgcaggagatgacatgcacccaaaggagaaaaagagaacacctgcttggtgtgatcgtatactgtggtatggagaaggtctccatcaattatcttatgtccgtggagaatcaaggttttcggatcacaagcctgtttatggcatattttctgcagaggttgagacaagtcatggaaggttgaagaaaagtatgagttgttgttctaagaacagaatcgaggtggaggaactcttgccatattcccatggatataccgaactaagttttttctgatgttagaaggactgaatatgggatttcagaacttggtcaacaaaagggagtcacttcagtttgaagaactctattcatggagattgataaaacaaaccatttcccacataccgaaaaagtatacagctaaagaactcttaaatacgtatctccgtgtttatatctatgtatcgtaagagtatctgtgctacattaatcatcatctcggtagcatctcacatcaacttaagtactaattatttgatagccaattaacaaacacacaactttacagtgtctcctgcacaatgattgggaggcccaaagagacccttttttatttgattaatgattctttagttgtttttggagaatattcatgatgtataactaagttgaaaagttcctcaacataatcattagggtataacttttttgtttcgagtgcagagaacaatgaatttcgatgtatacttcttacactgattgcaaaagtgatgaaaaagaaattgtaattacaaag

SEQ ID NO: 1914 - DNA, 1980 bp, Prunus persica
atgagagatgagaattccaagaaaagcaagctctcatggtcaaagaaaatggtcagaaagtggttcaatatcaagagcaaaactgaggactttcaggcagatgatgttgtttctggaggaggtgatcaggtcgaatacaggactagcttctcagagagggaaccgtgcacaattaagaaaagcaagacagagaaatttagcaagaacccagagcaggtccgtcgacgaaaaatgaatcttgaccatcctcgaatcatagatgtagaaaaccatagcatttttgttgctacatggaatgtggctggaagatctccaccaagtaatttaaaactagatgagtggcttcatgcctcacctcctgcagacatttatgttcttggatttcaagagatagttcccctaaatgctggtaatgttctgggagcagaagacaatggccctgccaagaaatggctggctctcattcgaaagactttaaacaatcttcccggtaccagcgggggtagtgggtgctatacaccatctcccatccctcatccaattgtagaactgcatgcagattttgaaggatcaagtaggcagaagagctcttctttctttcaacgccgatcattccaggcgacccaaagctggagaacggagaatgacccttcaatctcacaacctcgacttgatcgaaggttcagtgtttgtgatcgagtgatctttggtcacaggccaagtgactatgatcccagtttcagatggggtcataggccaagtgactattcaaggccgagtgactactcaaggccaagtgactactcaaggccaagtgactattctaggtgggcttcgtctgatgatgataatggaccaggtgattcaccaagtactgttttattctcaccaatgtcctatggtggatctgcatccaatgaaaatggatatagaatgccaggagggcattcaaggtacaacttagttgcaagcaagcaaatggttggcatctttcttacagtatgggtcaggagtgaactgagggattatgttcaaaacatgaaagtatcatgtgttggaagaggattgatgggttatcttgggaataagggatccatctctgtaagtatgtctttgcacgatacaaccttttgctttgtttgtactcacttaacatcgggacagaaggagggtgatgaactaagaaggaattcagatgtcatggaaatccttcggaagaccaggtttccacgggttaatggctcccgcgcgctgaaatccccagaaacaatcctggagcatgatcgagttatatggcttggggatttgaattatcgaatttccctctcataccgctctgctaaagcgttagttgagatgcaaaattggagggccttgttagagaatgaccaggcatgttttcaattacggctagagcagaaacgtggtcgtgtctttgctggctggaatgaggggaagatttattttccaccaacttacaagtattcaactaactcagacagatacgcaggggatgatatgcacccaaaggagaaacgtcgaacacctgcttggtgtgatcgaatattgtggtatggtgaaggtctccaacaattatcttatgtccgtggagaatctaggttctcagatcacagaccagtttatggtgtattttgggctgaggttgagtcaagccagagccggttgaagaaaagcacgagttattctagttccaggattgaagtggaggagcttcttccatattctcatggatatactgagctaaactttttctgaaggatgagagaacaatgatgaccgacaccggtcctgcattcaagtccccagttgcaggcgggaatcactttgaagaactaatcttgaagggtgatggagacttctcctagcccacaaaccgaaaaaggtgttaattttgcaattttggtcagtttaactctatacatcaacagcaagttgtacagtaacaacagttggttagca

SEQ ID NO: 1915 - DNA, 2312 bp, Lupinus angustifolius
tttgggtgcctcatgaagctctcatggtccaagagaatggtcagaaagttgttcaacatcaaaagcgaaagtgaggacccaccacatcagccacaacatggtcttgctcataatggaggaggtgatgtgcaatacagaaggcggaacagcttctctgagagagagccatccacaataaaaaagagcaaaacagaaaggtttagcaggaatttggagcgggtcaggcgaggaagaatgaatcttgaccatcctcgaattattgatgtccagaactatagaatctttgttgctacatggaatgtagctggcagatccccaccaagtaatttgaatatggatgattggcttcacgcctcagcgcctgcagatatttatgtacttggatttcaagagatagtccccttgaatgctggtaatatcttaggagcagaggacaatggccctgccaaaaaatggacggctctcattcgaaagactttaaacaatcttcctggtactagtggaggtagtggatattacacaccatctcctgctcctcaaccagttgcagaattaaatgcagattttgagggatcggctaggcagaagaattcatctttcttccaccggagatcattccaaacaccgtctaacagctggcgaatggacaacgatccctcaactgtgcagccacaactagatcgaaggttcagcgtctgtgatcgtgtaattcttggtcacaggcagagtgacattgatcccagtttaagatggggttataggcctagtgattattctagggcaagtgactattccagggcaagtgactactctagaccgagtgactattcaagatggggttcaaccgaagatgataatggccttggagattcacctagtacagtctcattttcaccgatgtcttatggtggacctgcctctaatgaagatgtatatcgcttgccagggaattcaaggtactaccttgtttcaagtaagcaaatggtgggaatatttcttaccgtgtgggtgagaggtgagttgaaagatcatgttcgaaacatgaaagtatcatgtgttggcagaggattgatgggttatcttggaaataagggatccatctcagttagcatgtctctacatgaaacaaacttttgcttcatttgtagccacttaacctcaggacaaaaagagggtgatgaactaagaagaaactctgatgtagcggagattctaaaaaagacaaggtttcctcgtgttcatggtgtagacgatgagaaatctcctgagacaatcctggagcacgatcgaattatatggcttggagatttgaattatcggatttccctctcctaccgttcagctacggcacttgttgagatgcaaaattggagagcattgttggagaatgatcagttgagaatagagcagaaaaggggtcgtgcatttgtgggatggaatgaaggaaaaatttatttccctccaacctataagtattcaactaattcagatagatacgcgggaggtgatatgcacccaaaggagaaaaggcgaacacctgcttggtgtgaccgtattttgtggtatggagaaggcctccaccaattatcttatgtccgcggagaatcaaggttttcagaccatagacctgtttacggcatattttgggctgaggttgagtcaagtcacggaagattgaagaaaagtacaagctgttctgcttcgagaattgaagtcgaagaacttcttccatactctcggggttatactgaattaagctttgtctaaaggaaggaaaggatggccaattcagcaactggtgaagaagagggaagttactttgaagagattaataatccatatataagttgaaaaagacaagccatttcacaaataccgaaaaaggtgcaaatatgtaattttgttctcatgctttgcaaaacacatgattagcttctcacgccagattcggtgcacataatttgatacccattaacactcaactttttacttctccgactccatttgctataagatatgattgaccagaaaattatttaataattacaatgacacaagaaaggagatgctccccacaaccattaggaagtgtggaagaagatgatgttttttttttagaatattcatgatgactgaataaagaggaaaatatcatccaagtaatcattaggttactaacttttttgtttctagtttaaagaagatgagagttttcatgtatattggttgctacactgatgtaaaagatattgtataaaaatgaaaattataattaattaatcatagaatcacacttaccaaatttgaagtac

SEQ ID NO: 1916 - DNA, 3157 bp, Populus trichocarpa
aacgaggcctctttgtttcaaagggagacatggagagagaagcttataagctttgtttctctcactatctctctgtctaaaaaactttgctttcctttatttctctatctatgtctcctacattgtcttgttctacttcaagaatctctcatctcacttccatgcattaaagcgtttgtctctcttgactaattgcattctcatactttgcgggtttcttcttgtttcttgttcataagcgtttcattagcgcattgacaaagtcttactacaagaggaaaccaagaacacccatttgctgttcggtcccttttgattcatttctagtcgagaccaagaaatccattcgtggttgagtgtatttggctgggtttggggtacctttcagaggtttttagagtttgtagagagtaaagaccttcctgacttgcttcaaagcttgatttactgaaagttcataaattgtggaaggagaattccagttgtggagttctatatcatttgagttagtgacctttttctggtggcattaatcaaagcttgggaaccggggaggggcagaaagtaaaataagagctatatgaattaacagtgaaaaatgactgatgggaattccaagaaaagcaagctctcctggtccaagaaaatggtcagaaagtggttcaacatcaagagcaaaaatgaggactttcaagctgataatatttacggagggggtgaagttgagtacaggactagcttctcagagagggagccatgtacaattaaaaagagcaaaacagagaaatttagcaagaatccagagcagttccgtcgacgtagaatgaatctcgaccatcctcgtatcatagacgttcaaaaccacagtatttttgtagcttcatggaacgtggctggaagatcccctccgagtaatttaagtcttgatgactggcttcatgcttcacctccggcagatatttatgttcttgggtttcaagagatagttcctttgaatgctggtaatgttctgggtgcagaagacaatggccctgccaaaaaatggctggctctcatcagaaagactctaaacaatcttcccggaactagtggaagtggtggatgctatacaccatctccaatccctgagccaatcgtagaaatagatgcagatttcgagggatcatctagacaaaagaatgcttctttctttcatcgccggtcattccagacaacccatagctggagaatggacaacgatccttcaattccacagccacgacttgatcggcgattcagtgtatgtgatcaggtaatattcggtcacagggcaagtgactatgatcctagcaatagatggggtaacaggtctagtgactactcaaggcccagtgattactccaggcccagtgattactccagatggagctctttggatgatgataacgggcccggggaatcaccaagtactgtattatattcaccaggttcctattctgcatctaccgaagatggacacgggaggccagggcattcaaggtactgcttagtggcaagtaagcaaatggttggcatattcctgacaatatgggtgaagagtgaattaagggatcacgtcaaaaacatgaaagtatcttgtgttggcagaggattgatgggttacctaggaaacaagggatctatttctgtcagcatgtccttgcaccaaacaagcttttgcttcatttgcagccatttaacctctggacagaaggaaggtgatgagttaagaaggaatgtagatgtcatggagattcttaagaagacaaggtttccacgggttaataacgcgggagatgagaagtccccagaaacaatccttgaacacgatcgagttatttggcttggggatttgaattatcgtattgccctgtcttaccgagctgccaaggcactagttgagatgcaaaattggagggcattgttggaaaatgaccagttaaggatagagcagaggcgaggtcgtgtttttgtgggatggaatgaggggaaaatttattttcctccaacgtacaagtattcaactaattctgacagatatgcaggagatgatatgcatccaaaggataaacgccgaaccccagcttggtgcgatagaattttatggtttggagaaggcctccatcaattatcttatgtacgcggggaatctcggttctcggatcataggcctgtctatggaatattttcggcagaggttgaatcgagccacgaccaattgaggaaaagcaccagttattctagttccagaattgaggtagaggagcttttcccttactcgcatgggtataccgaactgaactttttttgaaggttgatgagattggctgtaaatatgttttcaagtattacaattttctccacatatgaagtatggtttggcatcctcaatcactcaggcgggaatcactttgaacaaattttgccctgaagggtgatagagacattccgttgcccactgactgaaaaaggtgtaaatatgtgtaatttggtcaactaattaactccatacattatcagctcgtgtaacttcgatcagcataacgttccagttgctgtttggtacataattgaggtaccagattgactaaaacctaccttttttgtcacagtttcgtgcaagcactatcagtttttcattatgattcggatgaactcaacccatcaggaactgcgaagtcggtgactaaagatcaatttattcatgattcttttctttttttaatcttttttttttagtttaggaaacactcttaaattttgatgactgaaagaagatgaaggatgctcaatacaatcatttagggaactcaccttttgttttaaatgtagaaaccaagtaaagatccgatggatattcattaccaaagtgataggaaaaaaattatatatattgaaacttatgatagatttgagaaagcctcttgctcctcctgtcgttgctaatgatttactggaaaagttggtttctataatccacatgtactctgctgtttgctttttcttttttcttttacagctttggcaggtgtattggaagccatgatttatagagaataaatactctttcggagtgtatgccatgacataatcaatcactccaaactttttttcacaatccacaatgtgacatttcaag

SEQ ID NO: 1917 - DNA, 3635 bp, Vitis vinifera
aaaaaacgcatatagtactagtactaccagcaacacaatcgctttatctttttccttctttaactgcttttactttcatggaagaccaaatgggggagaattgatacagatggagggaggtattagatcttacacctctatgctttgctgaccagcgggcaggtggcggtgaagctgaccgggttgttttgtgtgtaatgggtaaagccaggcgacatgcccgttgccccaacatgttggggtggtcttgagatttggggtggaaagccttttggagagagagggggtctccagtctcagccctttattctgttcaaattcgatactttgctgtgactgagaagggagaggcaggctttgtttgaacagagagaaagcttctctctctactctctctctctttctgctttccctctctatgtctgccgcattgtcttgttctacccccagaatctcatctcacttccacgctttaaagctctctctcactctctctctctctatagtcgttgtggtgttgttgttccactttcagagagtatatacatgacataagaagaggggaataagaaaacccatcaattatttcgtgtcttttcttaagcgttcgagcttctttgaattagttgtaagagtttcagaaacttctgaaacaaagaacgaagcatgttagtagcccactgctttttatagagacaacccacaaattaggtgagaggaatcccatatatatgggagtctttttattgaatttttgacattattgtgggttcgtagcgaaacccagaaatcctgaaatagcagaagagctgtatgaagaagtactgaaacaatgagagatgggagctcgaagaaaagcaagctctcatggtcaaaaacactggtcagaaagtggttcaatatcaagagcaaaactgaggaatttcaggcagatgaggttgtgtgcggagggggtgatgtagaatggaggactagcttctccgaaagggagccatgtacaatcaagaaaagcaagacagagaaaataagcaagagtgcagagcgggtccggcagagcagaatagatcttgaccatcctcgagttatagatgtgcagaattatagcatctttgttaccacctggaatgtggggggaaaatctccacctagtaatttgaatctggatgattggctccatgcctcacctcctgccgacatttatgttcttggatttcaggaaatagttcctttgaatgcgggtaatgttcttggagcagaagataatggcccagcaagaaaatggctctctctgattcggaatactctaaataatcttcctggaaccagtggaagtggtgggtgctatacaccatcacccatcccagagcccattgtagaactggatgcagattttgagggatcagctaggcagaaggcctcatctttcttccatcgcagatcattccagacaacccgcagctggagaatggacaatgacccttcaatgactcaaccccgacttgatcggcgattcagtgtttgtgatcgtgtaatctttggtcatagaccaagtgattttgaccctaatttcagatggggtcacaggcctagtgactattccagatggggttcttctgatgatgacaatggtcctggggattcaccaagcactgtattattctcaccaatctcttgtggaggttctgcacctgtggaagaaggatatagaatgcctgggaattcaagatactgcttagttgcgagtaagcaaatggttggcatatttcttacagtgtgggtgagaagtgagctgagggattatgttcgaaacatgaaagtctcttgtgttggcaggggattaatgggttaccttggaaataagggatccatctcgatcagcatgtctttgcaccaaacaagtttttgcttcgtctgtagccacttaacctcaggacagaaggaaggcgatgagctaagaaggaactctgatgtcatggaaatcctcaggaagacaaggtttccacgagttaatgatacgggtgatgagaaatctccagaaacaattcttgagcatgatcgaattatttggcttggggatttgaattatcgtattgctctctcctatcggtctgccaaggcacttgtcgagatgcaaaactggagggctttgttagagaatgaccagctaaggatagaacagagacgaggtcgtgtttttgagggatggaatgaagggaagatatatttcccaccaacatacaagtattcaaataactcagacagatattcaggggatgatatgcaccccaaggagaaacgacggacacccgcatggtgcgatcgtattttgtggtatggaggtggtctccatcaattgtcttacgtccgtggggaatctagattctcagatcatagaccggtttatagcatattttgggctgaggttgagtcaataaatagccgattgaagaaaagcacgagttattctagttcaaggattgatgtagaggacttcttgccatactctcatggatacactgaactaagctttttctgaaggatggagggaattgttaaaaaccacaatcaattgcaggcgggaattgctttggagaaatttgtctttgaaggatgatggagacattccgttgcccactaaccgataaaggtgtaaattttgtaatatggttgaccaactaatttcacacaactccaacttgctgtacctttgctcacccattctttgttagtgaataatataccagtatgaagcataattcagtagttacctgattgactaacacccactttcatggcatctcaaagttcccactagcatttgctttcctgcatgatgatcaggatggactcactcaatcagaaactgccaagtgggtaaatgaagattattttattcatgattctttatttgttgaggggattttgatgactgaaagaagatggaagatggtcaaaacaatcatttgggtacttcccttttgttttaatgaaaaaaaaaaaaaaagatgtaaagatctgatggatagtcatgactgaagtgatacaaaggatataaaattgtagtttaggatagagatctgaaagctcttgctctctgttgccactaatgattttactgaaaaaaaaaaaagttggttttcttgattttctcccatttcccatctccactgtcgtctgctttatcttttctctgtggtgactggtgaacaacaaactagaaaagcataggacagttgacagatctggcaaggaaaccatctttgattattcttttgaggacagaaatcaacattatccttctatcattcttcaaagaacgagttctgatcttgaagaacatcactcgattacaacttgaaacacatttttcaagttggcatgtgggcatgggcaaatttcctagtaactcagccatattgtcctcaggggatgcatttctgtttttctgcacggttttgctagctaaccttactcaaaatgtgtgcaaatgcaacaaacaaattcatgataagggcattgctcagcctcagaacttggagatgaagagttaggggagatgatcaaactcaaactcaaaaaaagaacatgagagaagaaagcgatggggtgttaagaaaagtaatgcgggaatgtaa

SEQ ID NO: 1918 - DNA, 1942 bp, Manihot esculenta
taattgtttctttttacttggtgaagttatcatggtccaagaaaatggtcagaaagttgttcaatatcaggagtaaaattgaggactttcaagcagatgatgttcatggagggggtgaaatggaatacaggactagcttctctgaaagggagccatgcactatcaagaaaagtaaaacagagaaatttagcaagaatccagagcaggttcggcgaggaagaatgaatcttgaccatccccgaatcatagatgtgcagaactacagcatttttgtagctacatggaatgtggcaggaagatccccgccaagtaatttgagtctcgatgactggcttcatgcctcacctcctgcagacatatatgttcttggatttcaagagatagttcctttgaatgctggtaatgttcttggtgcagaagacaatggacctgccaaaaaatggctggccctcattagaaagactctaaataatcttccaggaactagtggcagtggtgggtgttatacgccatctccaatccctgaaccaattgtagaaatggatgccgattttgagggatcttccaggcagaagaactcatctttctttcatcgccgatcattccagacaacacacagctggagaatggacaatgacccttcaattacacaacctagacttgataggcgatttagtgtttgtgacagggttatgtttggtcacaggccaagtgactatgatcacagtcatagatggggtcacagacctagtgattattcaaggccaagtgattactctaggtctagtgattactccagatggggttcatcagacgatgataatggaccaggggattcaccaagtactgtattgtactcaccaatgtcctatggaggtccctatagtggatctacatctgtggaagatggatttaggaggccagggtgttcaaggtactgcttggtggcgagtaagcaaatggttggcatattcctcacaatatgggtccgaagtgaattgagagatcatgttagaaacatgaaagtttcttgtgttggcagaggattaatgggttatctagggaataagggatctatttcagtcagcatgtccttacatgaaacaaccttttgcttcatctgtagtcatctaacctctggacagaaggaaggtgatgagctaagaaggaatgcagatgtcatagagattcttaagaagacaagatttccacgtgttaatagtgcagcagatgagaagtccccagaaactattcttcagcatgatcgagttatttggcttggggatttgaattatcgcattgccctttcttatcgatctgctaaggctctagttgagatgcaaaattggagggcattgctggagaatgaccaggcatgtttacatacccacatcctgaactctactatcacttttgcggatagagcagagaagaggtcgtgtttttgtagggtggaatgaagggaaaatttatttcccacccacatacaaatattcaactaattcagacagatatgcaggagatgatatgcacccaaaggagaagcgtcgaactccagcttggtgtgatagaattttatggtatggagaaggcctccagcaattatcttatgtacgtggagaatctaggttctcagatcataggccggtttatggcatattttgggcagaggtggagtctagccatggccaattgaagaaaagtatgagctactccagttctagaattgaggtggaagagctcttgccatactcacatgggtacacagaactgaacttcttctgatggtgaggaaatagctatgacccccattagttgtaggcgggaatcactttgaagaaaatttttctttgaagtgtgattgagacattccgttgcccactaaccgaaaaaggtgtacattttgtaatttggtcagttaattaactctacacatcatcaa

SEQ ID NO: 1919 - DNA, 2777 bp, Medicago truncatula
tttgctgttgttgcagagaacaaggacctatgtttccaagagagagaaactgaaacataagttgaaaaaacctctctttatttctttctttgccctgtcacaatgtcttgttctacttcacaatctcaccattattaaattcaacactttaaagggcttctcttccctcactttcttctaacttgtttcattatttccttacttaggactttgtctttaatcacacaacaacttatgagaccaccttgttcttgtttttctcttctcaaaaaacaaagcaaaaagtgttgaatttggtttcttcaattaccaagtactactattttgttgataacactgagaaagaaagaaagaaaaaaaaaaaaaaaaaagcattcttgaggaggtgtatgaagtaaaactaaaagagattcacaatgagagatgagaataccaagaaaagcaagctctcatggtcaaagaaaatggtcagaaaattcttcaatatcaaatgcaaaactgaagacactactcaacaaagggacggttttgcttctggaggaggtggcttggaatacagaagcaggagtagtttgtctgagagagagccaagcacaatcaaaaagagcaaaacagagaaatttagcaggaactcgagtcaggttaggcgagcgaggatgaaccttgaccatcctagaattatagatgtccataactatagcatttttgttggtacatggaatgtggccggaagatccccgccgagtaatttgagcataaacgattggcttcacgcctcaccgcctgcagatatttatgttcttggatttcaagagatagttcccttgaatgctggtaatatcttaggggcagaagataatggccctgccaaaaaatggctagctctcattggaaatgctttaaacagtcttcccggtactagtggaggtaatggatactacacaccttctcctatacctcagccagtggtagaattgaatgccgattttgaaggatcagctaggcagaagaattcatcattcttccatcggcgatccttccaaacaacttctagcagctggggaatggacaatgatccttcaaccgtgcaaccacgactagaccgaagattcagcgtctgtgatcgggtgatttttggcaacaggaaaagtgactttgatcctagtttaagatggggttataggcctagtgactattcaagggcaagtgactctcgaccgagtgactattatacaaggccaagtgactctcgaccgagtgactattattcaagggcaagtgactactctcgaccgagtgactattattcaagggcaagcgactactctcgaccaagtgactattcaagatggggttcatctgaagatgacaatggcctcgaagattctccgagtacagtcctgttttcaccaatgtcttatggaggacctgctgcatcgggtgaagatggatacagcatgccggggcgctcaaggtacagccttgttgcaagtaaacaaatggttggaatctttcttaccgtttgggtgagaggtgaattgaaggatcatgttaaaaacatgaaagtatcgtgtgttggtagaggattgatgggttatctcggaaataagggatccatctcaattagcatgtctctgcatgaaacaagcttctgctttatttgtagccatttaacctcaggacagaaagaaggtgatgaactaagaagaaactctgatgtattggagattcttaaaaagacaaggtttccacgtgttcatggttctgacagtgtgaagtctccggagacaatccttgagcatgatcgaattatatggcttggagatttaaattatcgaatagccctcaactaccgttctgcgaaggcgcttattgagatgcaaaactggagagcattgttagagaatgaccagttgagaatagagcaaaagcgaggccgtgcatttgcaggatggaaagaagggaagatttatttccctccaacatataagtattcaaccaattcagataggtatgctggagatgatatgcatccaaaggagaaaaggcgaacacctgcttggtgtgaccgtattttgtggcatggagaaggtctacgtcaaatatcttacgtacgcggagaatcgagattttcagaccacagaccggtttatggcttattttgggccgaggttgagtcaaaccatggaaaattgaagaaaagtatgagctgttctcgttccagaatccaagtggaggaacttttaccatattctcacggatacactgagctaaactttttctaagggcaggaggactaattgtgagatatgtgcagccgtgttcaacaagcgggagtacctttgaagtttgatgaaagagacaaagcatttcccaaataccaagaaaggtgctaatatgtaatttcacttaacactcatgccttacccaacaacaacacatgatcagtagattccatcaaacatcataatcataatcatgttgttgtgttagctaactcatgccagcttcactttgttcataatttgataccttattaacaaacactcaactttctattgtctcaatgctccgtaccatatcctgcacaatcattattagccaggagtggtaaagaagacattatttaattcatgattctttaattatttttggagaaacattgtcaaaatcatcatatggaggcgtgtactactagcttttactgtttttttgtttttagtttctaatgttgaaaattttgatgtatactgattattgtacaaattaaagaaaaa

SEQ ID NO: 1920 - DNA, 1947 bp, Fragaria vesca
gtgtttggtattgtttggtgaagctctcatggtcaaagaagatggtcaggaagtggttcaatatcaagagcaaaactgaggactttcaggcagatgatgttgtttatggagctgaggttgaatacaggactagcttctcagagagggaaccgtgcacgattaagaaaagcaaaacagagaagttcagcaagaacactgagcaggtccgtcgacgaaagatgaatcttgaccatcctcgaatcatagatgtgcagaaccatagcatttttgttgctacatggaatgtggccggaagatctccaccaagcaacttaaatatggatgagtggcttcatgcctcacctccagcagacatttatgttcttgggtttcaagagatagttccactaaatgctggtaatgttctgggggcagaagacaatggccctgccaagaaatggttggccctcattcggaaaactttaaacaatcttccaggtactagtggtggcggtggctgctatacgccatctcccatcccacagccaattgttgagttacatgcagattttgagggatctgctaggcagaagagctcatctttttttcaaaggagatcattccaggcaacccctagctggcgaacggagaatgacccttcagcttcacaaccccgacttgatcggagattcagtgtttgtgatcgggtgatctttggtcacaggccaagtgactatgatcccaacttcagatggggtcacaggccaagcgactattcaaggcatagtgactactcaggtccgagtgactattattctaggcctagtgactactcaaggccgagtgacttttctaggtggggttcgtccgatgatgataatggaccaggcgattcaccaagtactgttttattctcaccaatgtcctatgctggatctgcatccaatgacaatggatatagaatgccagggcattcaaggtacaacttagttgcaagcaagcaaatggtgggcatatttcttacagtatgggtcaaaagtgaactgagggatcatgttaaaaacatgaaggtatcatgtgtaggaagaggattaatgggataccttggaaataagggatccatttcagtcagcatgtctttgcacgatacaaccttttgctttatttgtactcatttaacatcaggacagaaggagggtgatgagctaagaaggaattctgatgtcatggagatccttaggaaaacaaggtttccaaaggttaatggctctagcgcgttgaaaaacccagaaacaatcttggagcatgatcgagttatctggcttggggatttaaattatcgaatttccctctcttaccgctctgctaaggcattagtcgagatgcaaaactggagggccttgttagagagagaccagttaaggatagagcaaaaacgtggtcgcgcatttgtgggatggaacgaggggaagatttacttcccaccaacctacaagtattctactaattcagacagatatgcaggggatgatatgcacccaaaggagaaacgtcgaacacctgcttggtgtgatcgaatattgtggtatggtgaaggtctccaacagttatcttatgtccgtggggaatctaggttttcagatcatagaccagtttatggcatattttgggcggaggttgagtcaagtcacaacaaactgaagaaaagcactagttattctagttctaggattgaagtagaggagcttctgccatattcacatggatatactgagctaaactttttctgaaggatgagggaacaatgatgacccacatcggtcccatatcaagcgggaatcactttgaaggactcatgaaggctgatggagacattcctcatcccacaaatcgaaaaaggttgatattgaaatttttgtcagtaactacatacatcaacagaaaattgtacagtaactacagttgatt

SEQ ID NO: 1921 - DNA, 1872 bp, Zea mays
catcgctccttcctcatcatcagttgttgccaccacccttccctccctccattcctctccgcgtcgccccacatcccatcttggcctggacacctgggctgcctcgctccgtttccgcgctcgcggacgcgccgagtcccggccgaaccaggcgcccgccctccctcccgccgctaccagcgtcgatctgcgaccgaagagcgattcagaggcagggtgagggggggagacgagttcttgtcggtttcattcttggccgccgacttcacatgccaacaaccccaaggagcagaagccaggctaggaccactaggccttggatcttgtcagggatggactttgctgattcgagacggaagcctaatttcacggggaagattgccgtggctgctgccctcacggtcatgtgcataatcgtgttgaaacagtcccctagtttcagcggcaccagcgtgttctctcgccatgaaactggggtgacccatgtgttagtaacaggcggtgctggttatattggctcacatgctactcttcgtctccttagtgacaagtacagggttaccattgtggataacctatccagagggaacatgggagctgtcagagttcttcaacggctatttccagaacccggaaggcttcagtttatttatgctgacttaggcgatgccaaagctgtgaagaaaatattttcggagaatgcatttgacgctgttatgcactttgctgctgttgcttatgttggtgagagcacaatggagccactcaggtactaccacaacataacatcaaacacattgacagttcttgaggcaatggcagcatataatgtaaatactctgatttactcgagtacgtgtgcaacctatggtgaacctgatacgatgcctattgtagaaacaactcctcagaatcctatcaatccatacggtaaggcaaagaagatggcagaggacatcatcctagattttacaaaatcaaagaagcaatcagacatggctgtaatgatcttaagatacttcaatgtgattggatcggacccagaggggcgactaggagaagctccaaggccagagctacgcgagcatggacggatatccggtgcttgctttgatgcggctttgggaatcattccagggctaaaggttcgtggaactgattactccactgcagatggaacttgtattagggactacatcgatgtcacagaccttgtagatgcccatgtcaaagctcttggtaaagctcagccaggcaaagttggaatctacaacgtcggaacaggccaaggtagatcggtgaccgagtttgtagaagcttgcaagaaggcaacgggagcttccatcaaggtcgaatatcttgcccgtagacctggagattacgccgaggtatacagcgacccgtcgaaaatcctcagggacctcaactggacagcccaatacacggatcttggccaaagccttgcccaggcgtggaaatggcagaaggcgcacccgaacggatatgcgtcagcctgattcagagctcaaaaggttgagagactcatcactcagattcatccaaggggtccgtccatgtgcagtcaatatagccttcagacaattggttcttcaccatagaaaaaacgtagcaacagcaacagaagagtcgtgattcttttattgcagagctggaagaagacaagagtatcgcagggagaatacactacctgttccttgattagtttcatttatatgtataggtcctcttttcgttggtggcattttagtacaatttggtgtaataacacaaggaaatcgtgttgtagacagggtagatcgaatctcgtgtatcgaccttcgtcttcttcgtggtggtagaatgaaaggatat

SEQ ID NO: 1922 - DNA, 1878 bp, Zea mays
gtctcctcctccttcagttgttgccaccgcccttccctcccttcctctccgcgtcgctcgccgtcccatctttggcctggacacctggcctgcccccccttcgcggacgcgccgggtcgccggccgaatccgccctcccgccgctgccaacgtcgatctgcgcccgcccgcccgcccgccaagtgagattcaaaggtaggacgacgggggggtcgagttcttgtcggtttcattcctggccgccgacttcacatgtcaacaaccccaaggagcagaagccagggtagtaggaccactaggccgtggatcttgtcagggatggactttgctggttccagacggaagcctaatctcacggggaagattgccgtggctgctgccctcacggtcatgtgcataatcgtgttgaaacagtcccctagtttcagcggtaccagcgtgttctctcgccatgaaactggggtgacccatgtgttagtaacagggggtgctgggtatattggctcacatgctactcttcgtctccttagtgacaagtaccgagttaccattgtggataacctatccagagggaacattggagctgttagagttcttcaacggttatttccagaacccggaaggcttcaatttatttatgctgatttaggcgatgccaaagctgtgaacaaaatattttcggagaacgcatttgatgctgttatgcactttgctgctgttgcttatgttggtgagagcacaatggagccactcaggtactaccacaacataacgtcaaacacattgacagttcttgaggcaatggcagcacataatgtaaatactctgatttactcgagtacgtgtgcaacctatggtgaacctgatacaatgccgattgtagaaacaactcctcagaatcctatcaatccatatggtaaggcaaagaagatggcggaggacatcatcttagattttacaaaatcaaagaagcaatcaaatatggctgtcatgatcttaagatacttcaacgtgattggatcagacccagagggacggctaggagaagctccaaggccagagctacgcgagcatggacggatatccggtgcttgctttgatgcagctttgggaatcattccagggctaaaggttcgtggaaccgattactccactgcagatggaacttgcgttagagactacatcgatgtcacagatcttgtagatgctcacgtaaaagctcttggtaaagctcagccaggcaaagttggaatctacaatgtcggaacaggccaaggtagatcagtgactgagtttgtagaagcttgcaagaaggcaacaggagcttctatcaaggtcgaatatcttgcacgtagacccggagattatgccgaggtatacagcgatccgtcgaaaatccacatggaactcaactggacagcccagtacactgatcttggccaaagcctcgcccaggcgtggaaatggcagaaagcgcacccgaacggatatggaccagcctgattcagagttcaaagattgagagagactcgtcacgcagatccaaagggtccatgtgcagtcatgtagccttcagacagttggttcttcatcaccatagaaagatagcaaagagcaacagaagagtcctgattcttttattgcagcgctcgaagaaggaaaaaatatcacagagaaccccctacctgctccttgattagtttcaaatatatatatataggtcctcgttgacattttaatataatttgatgtgtgctgaggcgctatataataacacaaacgaaattttgttgtagacagggtagatcgatctcgtgtatcaacttttgtggtggtagaatgaaaggatataaataagttgatgtaagtttttgtttc

SEQ ID NO: 1923 - DNA, 1661 bp, Echinochloa colona
attcaaaggtgttagggcgagcgaggccgaggtctagctggcctcatccttgggagccgacttcacatgccaacaaccccgaggagcagaagccaggctaggaccactaggccttggatcttgtcagggatggacttcgctgattcgagacggaagcctaatttcacggggaagatcgccgtggctgctgccctcactgtcatgtgcataatcgtgttgaaacaatcgcctagtttcagcggtaccagtgtgttctctcgccatgaaattggggtgacccatgtgttagtaacaggaggtgctgggtatattggctcgcatgctactcttcgtctccttaaggacaactaccgagttaccattgtggataacctttcgcgaggtaacatgggagctgtaagagtccttcaacggctatttccacagcctggaaggcttcaatttatttatgctgatttaggcgatgccaaagctgtgaacaaaatattttcagagaatgcatttgacgctgttatgcactttgctgctgttgcttatgttggtgagagcacaatggagccactcaggtactaccacaacataacatcaaacacattgacagttcttgaggcaatggcagcacataatgtaaatactctgatttactcgagtacttgtgcaacctatggtgaacctgatacaatgcctattgtagaaacaactcctcagaatcctatcaatccatatggtaaggcaaagaagatggctgaggacatcatcttagatttcacaaaatcaaagaaatcaaacatggcagtcatgatcttaaggtacttcaatgtaattggatcagacccagagggacggctaggagaagctccaagaccagagctgcgtgagcatggacggatttctggcgcttgctttgatgcagctttaggaaccattccagggttgaaggttcatggaaccaattaccccactgcagatggaacttgcattagggactacattgatgtcacagatcttgtagatgcccatgtcaaagctcttgataaagctcagctaggcaaagttggaatctacaatgtcggcacaggcaaaggtagatcagtgaaggagtttgtagaagcttgcaagaaggcaacaggagcttccatcaaggtttcatatcttaaacgtagacccggagattatgctgaggtatacagtgacccatcaaaaatccacaacgagctcaactggacagctcaatacactgatcttggccaaagcctttcccaggcatggaaatggcagaaagcccacccaaacggatatggatcagcttgattcagagtttaataggttcagaggttcatcacgcagattcatgggtccgtgtgcagtcttataggcttcagaagttggtacttcaccatagaaacacatagcaaacagccacagaaagtcctgaattttttgattcatgggtccatgtgcagtcatggaaaaagagacagaatgacagagagaacgcccgacatgttccttggttaggttcatatatatagattttcttttgattgttgacatgttatttgttttggtatgtgctgaggcactatataataacacaaatgcaaaattgtgttgtagacagagtagatcaatcctgtgtacgaaacctattatggcggggg

SEQ ID NO: 1924 - DNA, 1819 bp, Echinochloa colona
gtcgcttcccatcttggcctgggcacctgtcctggtgggaggctgctccctcctccgctcccgcgttccccggacgcgtgcgcgatctcgcgctgcgcgcgctgaatctcgccgcccggcctctcccgtcgcggccgacgtcgatctgccccagcgcgcgcaagattcaaaggtgctagggcgagcgaggtcgaggtctagctggcctcatccttgggagccgacttcacatgccaacaaccccgaggagcagaagccaggctaggaccactaggccttggatcttgtcagggatggacttcgctgattcaagacggaagcctaatttcacagggaagattgctgtggctgctgccctcactgtcatgtgcataatcgtgttgaaacaatcgcctagtttcagcggtaccagtgtgttctctcgccatgaaatcggggtgacccatgtgttagtgacaggaggtgctgggtatattggctcgcatgctactcttcgtctccttaaggacaactaccgagttaccattgtggataacctttcacgaggtaacatgggagctgtaagagtccttcaacggctatttccacagcctggaaggcttcaatttatttatgctgatttaggcgatgccaaagctgtgaacaaaatattttcagagaatgcatttgatgctgttatgcactttgctgctgttgcttatgttggtgagagcacaatggagccactcaggtactaccacaacataacatcaaacacattgacagttcttgaggcaatggcagcacataatgtaaatactctgatttactcgagtacttgtgcaacctatggtgaacctgatacaatgcctattgtagaaacaactcctcagaatcctatcaatccatatggtaaggcaaagaagatggctgaggacatcatcttagatttcacaaaatcaaagaaatcaaacatggcagtcatgatcttaaggtacttcaatgtgattggatcagacccagagggacggctaggagaagctccaagaccagagctgcgtgagcatggacggatttctggcgcttgctttgatgcagctttaggaaccattccagggttgaaggttcatggaaccaattaccccactgcagatggaacttgcattagggactacattgatgtcacagatcttgtagatgcccatgtcaaagctcttgataaagctcagctaggcaaagttggaatctacaatgtcggcacaggcaaaggtagatcagtgaaggagtttgtagaagcttgcaaggaggcaacaggagcttccatcaaggtttcatatcttaaacgtagacccggagattatgctgaggtatacagtgacccatcaaaaatccacaacgagctcaactggacagctcaatacactgatcttggccaaagcctttcccaggcatggaaatggcagaaagcccacccaaacggatatggatcagcttgattcagagtttaataggttcagaggttcatcacgcagattcatgggtccgtgtgcagtcatataggcttcagaagttggtacttcaccatagaaacacatagcaaacagccacagaaagtcctgaattttttgattcatgggtccatgtgcagtcatggaaaaagagacagaatgacagagagaacgcccgacatgttccttggttaggttcatatatatagattttcttttgattgttgacatgttatttgttttggtatgtgctgaggcactatataataacacaaatgcaaaattgtgttgtagacagagtagatcaatcctgtgtacgaaacctattatgg

SEQ ID NO: 1925 - DNA, 1980 bp, Panicum virgatum
ggcacatgcccagaagctaattatgacccggtagtagtagaaaggaaacgccccccgacgacctgctcctcagtttgctccccttccgcctccgcgtccgcttcccatcttggcctggacacctgggctgcccccctccgtttccgcgctccccggatgcgcaccgatctcgcgccgcgcgcctaagtcgccgccggaatccgccccgccctcgcgccgctgccagcgtcgggcgacaaggtgatactggtgccaaggtaggacgagaggggtcaagttcttactggtttcattcttgaagccgccgacttcacatgccaacaaccccgaggagcagaagccaggctaggaccactaggccttggatcttgccagggatggactttgcggattcaagacggaagcctaatttcacggggaagattgctgtggctgctgccctcactgtcatgtgcataattgtattgaaacagtcgcctggtttcagcggtaccaatgtgttctctcgccatgaaattggggtgacccatgtcttagtgacaggaggggctgggtatattggctcgcatgctactcttcgtctccttaaggacaactaccgtgttaccattgtggataacctttccagaggtaacatgggagctgtaagagttcttcaacggctgtttccacagcctggaaggcttcaatttatttatgctgatttaggcgatgccaaagctgtgaacaaactattttcggaaaatgcatttgacgctgttatgcactttgcggctgttgcttatgttggggagagcacaatggagccactgaggtactaccacaacataacatcaaatacactgacagtgcttgaggcaatggcggcgcataatgtaaatactctgatttactcgagtacttgtgcaacgtatggtgaacctgatacgatgcctattgtagaaactactcctcagaatcctatcaatccttatggtaaggcaaagaagatggcagaggatatcatcttagatttcacaaagtcgaagaaatcaaacatggctgtcatgatcttaagatacttcaatgtgattggatctgatccagaggggcggctaggagaagctccaaggccagagctgcgtgagcatggtcgaatttctggtgcttgcttcgatgcagctttgggaatcatttcagggcttaagattcgtggaactgattaccccactacagatggaacttgcatcagagactacatagatgtcacagatcttgttgatgcccatgtcaaagctcttgataaggctcaacctggcaaagttggaatctacaatgttggcacaggccaaggtagatcagtgaaggagtttgtagaagcttgcaagacggcaacaggagcttccatcaaggttgaatatcttacccgtagacctggagattatgccgaggtatacagtgacccatcgaaaatccaccgtgagctcaactggacagctcaatacactgatcttggccaaagccttgcccaggcgtggaaatggcagaaagcccacccaaatggatacggatcagcctgattcagagtttaataggttcatcacgcagattcgtgggtccatgtgcagtcatataggcttcatcagactctttgttcttgaccatagaaaaagcatcggggacagtcacagaaagtcctgaaattttttgattcatgggtccatgtgcagtcaaatggaagaagacggaatcacagagagaatggcttacgtgttccttgattaggttcatatatatataggttctcttttgagtgttgacattttatttgttttgatatgtgccgaggcactatataataacacaaatgcaaaattgtgttgtagacagagtagatgaatcttttgtacggaacctattatggtggtggaatgaaaggatataaataagtttatttatctttccttcttatttcaagtgtacaaggctttgtttgccatg

SEQ ID NO: 1926 - DNA, 1457 bp, Echinochloa colona
cccagcgcgcgcaagattcaaaggtgctagggcgagcgaggtcgaggtctagctggcctcatccttgggagccgacttcacatgccaacaaccccgaggagcagaagccaggctaggaccactaggccttggatcttgtcagggatggacttcgctgattcgagacggaagcctaatttcacggggaagatcgccgtggctgctgccctcactgtcatgtgcataatcgtgttgaaacaatcgcctagtttcagcggtacgagtgtgttctctcgccatgaaattggggtgacccatgtgttagtgacaggaggtgctgggtatattggctcgcatgctactcttcgtctccttaaggacaactaccgagttaccattgtggataacctttcgcgaggtaacatgggagctgtaagagtccttcaacggctatttccacagcctggaaggcttcaatttatttatgctgatttaggcgatgccaaagctgtgaacaaaatattttcagagaatgcatttgatgctgttatgcactttgctgctgttgcttatgttggtgagagcacaatggagccactcaggtactaccacaacataacatcaaacacattgacagttcttgaggcaatggcagcacataatgtaaatactctgatttactcgagtacttgtgcaacctatggtgaacctgatacaatgcctattgtagaaacaactcctcagaatcctatcaatccatatggtaaggcaaagaagatggctgaggacatcatcttagatttcacaaaatcaaagaaatcaaacatggcagtcatgatcttaaggtacttcaatgtgattggatcagacccagagggacggctaggagaagctccaagaccagagctgcgtgagcatggacggatttctggcgcttgctttgatgcagctttaggaaccattccagggttgaaggttcatggaaccaattaccccactgcagatggaacttgcattagggactacattgatgtcacagatcttgtagatgcccatgtcaaagctcttgataaagctcagctaggcaaagttggaatctacaatgtcggcacaggcaaaggtagatcagtgaaggagtttgtagaagcttgcaaggaggcaacaggagcttccatcaaggtttcatatcttaaacgtaggcccggagattatgccaaggtatacagtgacccatcgaaaatccacaatgagctcaactggacagctcaatacactgatcttggccaaagcctttcccaggcatggaaatggcagaaagcccacccaaatggatatggatcagcctgattcagagtttaataggttcagaggttcatcacgcagattcatgggtccgtgtgcagtcatataggcttcagaagctggttcttcactatagaaacacatagcagacagccacagaaagtcctgaatttttt

SEQ ID NO: 1927 - DNA, 2191 bp, Panicum virgatum
taaacaggcacatgcccagaagctaattatgacccggtagtagtagaaaacgtcttcccccgacgacctgttcgtcctcagtttgctccccttccgcgtccgcttcccatcttgacctgggcacctgggctgccccccctccgtttccactctccccggacgcgcaccgatctcgcgccgcgcgcccaagtcgacgccagaatccgccccgcctccgcgctgctgccagcgtcgcgcgacaaggtgtgggctcccttgccgtgatccaatttcttttctttttcttccatcgtctttcgtagcctttcgccggggatttgaattctcgcgacgcgttctggatcggtatgcgcgtccttggtttctgcctggagcttttcgccggagatcttttttttgttcgcacgtctgtgtgtggagatggcactgcaacttgcaaaagttttgtgtttgatcttgggacgaatttaatcgggtgatactggtgccaaggtaggacgagagaggtccagttcttgctggtttcattcttgggagccgccgacttcacatgccaacgaccccgaggagcagaagccaggctaggaccactaggccttggatcttgccagggatggacttcgcggattcgagacggaagcctaatttcacggggaagattgctgtggctgctgccctcacggtcatgtgcataattgtattgaaacagtctcctggtttcagcggtaccaatgtgttctctcgccatgaagttggggtgacccatgtcttagtgacaggaggggctgggtatattggctcgcatgctactcttcgtctccttaaggacaactaccgtgttaccattgtggataacctttccagaggtaacatgggagctgtaagagttcttcaacggctgtttccacagcctggaaggcttcaatttatttatgatgatttaggcgatgccaaagctgtgaacaaactattttcagaaaatgcatttgatgctgttatgcactttgctgctgttgcttatgttggggagagcacaatggagccactgaggtactaccacaacataacatcaaatacactgacagtgcttgaggcaatggcggcgcataatgtaaatactctgatttactcgagtacttgtgcaacgtatggtgaacctgatacgatgcctattgtagaaactactcctcagaatcctatcaatccttatggtaaggcaaagaagatggcagaggatatcatcttagatttcacaaaatcaaagaaatcaaacatggctgtcatgatcttaagatacttcaacgtgattggatctgacccagaggggcggctaggagaagctccaaggccagagctgcgtgagcatggtcggatttctggtgcttgtttcgatgcggctttgggaattatttcagggctaaagattcgaggaaccgattaccccactacagatggaacttgcatcagagactacatagatgtcacagatcttgttgatgcccatgtcaaagctcttgataaggctgaaccgggcaaagttggaatctacaatgttggcacaggccaaggtagatcagtgaaggagttcgtagaagcttgcaagaaggcaacaggagcttccatcaaggttgactatcttgcccgtagacctggagattatgccgaggtatatagtgacccatcaaaaatccaccgtgagctcaactggacagctcaatacactgatcttggccaaagccttacccaggcgtggaaatggcagaaagcccacccaaaaggatatggatcagcctgattcagagtttaataggttcatcacgcagattcctgggtccatatgcagtcatataggcttcatcagacagttgggttttgaccatagaaacattgcggatagacacagaaagttctgaaattttttgattcatgggtgcagtcaaatggaagaagacagaatcacagagagaatggcttacgtgttccttgattaggttcatatatataggttctcttttgattttgttgaaattttttttctttatatgtgctgaggcactatataataacacaaatgcaaaattgtgttgtagacagagtagatgaatcttatgtacggaacctattatggtggtggaatgaaaggatataaataagtttgtgtatctttccttccttatttcaacgtacacaa

SEQ ID NO: 1928 - DNA, 1889 bp, Setaria italica
ctcagttttgttgccacctccctccccttcccctcctcctcctccgcaccgcgtcgctccccatcttggcctggacacctgggccgcctccctccgtttccgcggctcgcggacgcgcaccgatctcgctgcggcgcggctgaatcgccgcttgaatccggcctctcccttcctccgcctgccgtcgtcgatctgcgagcgagcggccgcgaggttgcaaggtaagacgagagaggtcgagttcttgctggtttcattcttgggagccgacttcacatgccagcaaccccgaggagtagaagccaggctaggaccactaggccttggatcttgccagggatggacttcactgatacgagacggaagcctaatttcacggggaagatcgccgtagctgctgccctcacggtcatgtgcataattgtgctgaaacagtcgcctagtttcagcggtaccagtgtgttctctcgccatgaaattggggtaacccatgtcttagtgacaggaggggctgggtatattggctcgcatgctactcttcgtctccttaaggacaactaccgagttaccattgtggataatctttccagaggtaacatgggagctgtaagagttctgcaacggctgtttccacagcctggaaggcttcaatttatttatgctgatttaggcgatgccaaagctgtgaacaaaatattttcggagaatgcatttgatgctgtaatgcactttgctgctgttgcttatgttggtgagagcacaatagagccactcaggtactaccacaacataacatcaaatacactgacagtgcttgaagcaatggcggcacataatgtaaatactctgatttactcgagtacttgtgcaacatatggtgaacctgatacgatgcctattgtagaaacaactcctcagaatcctatcaatccatatggtaaagcgaagaagatggcagaggacatcatcttagatttcacaaagtcaaagaaatcaaacatggctgtcatgatcttaagatacttcaacgtgattggatcagacccagaggggcggctaggagaagctccgaggccagagctgcgtgagcatggacggatttctggtgcttgctttgctgcagctttgggaatcgttccagggctaaaggttcatggaaaagattaccccactacagatggaacttgcgttagagactatatcgacgtcacagatcttgttgatgcccatgtcaaagctcttgataaagcgcagcctggcaaagttggaatctacaatgttggcacaggacaaggtagatcagtgaaggagtttgtagaagcttgcaagatggcaacaggagcttccatcaaggtttcatatcttaaccgtagaccgggagattatgctgaggtatacagcgacccatcgaaaatccacagggagctcaactggacagctcaatacactgatcttggccaaagcctttcccaggcgtggaaatggcagaaagcccacccaaacggatatggatcagcctgattcagagtttaataggttcatcatgcagattcatgggtccatgtgcagtcatgtaggcttcagagttcagacagttggttcttaaccatagaaacatcgcagacagccacagaaagtcttgaaattttttgttcatgggtccatgtgcagtcatatggaagaagacagaatcacagagagaacatcttgattaggttcatacatataggttctcttttgattgttggcattttatttgttctgatatgtgctgaggcactatataataacacaaatgcaaaattgtgttgtagacagagtagatcaatcttgtgtacgaaacctattatggtggtggaatgaaaggatagaaataagtttacgtgtta

SEQ ID NO: 1929 - DNA, 1781 bp, Pennisetum glaucum
cgccccctgccgtcgtcgtcgatctgcggccgcgaggtcggcaaggtagggcgagaggggccgagttcttgctggtttcattcttgggagccgccgacttcacatgccagcaaccccgaggagcagaagccaggctaggaccactaggccttggatcttgtcagggatggacttcgctgatacgagacggaagcctaattttacggggaagatcgccgtagctgctgccctcacggtcatgtgcataattgtgctgaaacagtcgcctagtttcagcggtaccagtgcgttctctcgccacgaaattggggtaacccatgtcttagtgacaggaggggctgggtatattggctcacatgctactcttcgtctccttaaggacaactaccgagttaccattgtggacaatctttccagaggtaacatgggagctgtaagagttctgcaacggctgtttccacagcctggaaggcttcaatttatatatgctgatttaggcgatgccaaagctgtgaacaaaatattttcagagaatgcatttgacgctgtaatgcacttcgctgctgttgcatatgttggtgagagcacaatggagccactcaggtactaccacaacataacatcaaatacactgacagtgcttgaagcaatggcggcacataatgtaaatactctgatttactcgagtacttgtgcaacatatggtgaacctgatacgatgcctattgtagaaacaactcctcagaatcctatcaatccatatggtaaggccaagaagatggcagaggacatcatcttagatttcacaaagtcaaagaaatcaaacatggctgtcatgatcttaagatacttcaacgtgattggatcagacccagaggggcggctaggagaagctccaaggccagagctgcgtgaacatggacggatttctggcgcttgctttgctgcagctttgggaatcattccagggctaaaggttcatggaagagattacaccactgctgatggaacttgtgttagagactatatcgacgtcacagatcttgttgatgcccatgtcaaagctcttgataaagcacagcctggaaaagttggaatctacaatgttggcacaggcaaaggtagatcagtgaccgagtttgtagaagcttgcaaggcggcaacaggagcttccatcaaggtttcatatcttgaccgtagacccggggattatgctgaggtatacagcgacccaacgaaaatccgcacggagctcaactggacagctcaatacactgatcttggtcaaagcctttcccaggcgtggaaatggcagaaagcccacccaaacggttatggatcagtctaattcagagtttaataggttcatcacacagattcatgggtccatgtgcagtcaataggcttcagagttcagacagttggttcttaaccatagatacatctcagacagccagagaaagtcctgaaatattttttcatggtccatgtgcgactatatggaagaagacagtatcacagagaacatcttgaattcttgattaggttcatacatataggatctcttttgaatgttggcattttatttgttctgatatgtgctgaggcactatataataacacaaatgcaaaattgtgttgtagtcagagtagatcaatcttgtgtacgaaacctattatggtggtggaatgaaaagattaaataagtttattatgtatttttaccttaaaaaacaaaaaaaaaaaaaagtaaaactactagacgttagataccactgctt

SEQ ID NO: 1930 - DNA, 1544 bp, Hordeum vulgare
atcatacgccggaagattcctataaatcggcgcaaagcttattctgacttggtaatagaaactcccccgacgacttgctcctcctccccccctcacttccctcccccttcccgcatcttggaccgttgttcaccgatctcgcgcggcgcccaaatcgccggcgaggtccatcctccgtcccccgccgagccgatctgctcgcgagattcgtaggccggaggaggaggggaggaggaagttgagttcttgttggtttcttcagcgggagccgaccgcacatgccaacaaccccccggagcagaagccaagctaggaccaccaggtcttggatcttgtcaggcatggacttcggcgacacgagacgcaagcccaatttcgccggaaagatcgcggtggctgccgccctcactgtcatgtgcatacttgtgttgaaacagtctcctggttttggcggtactagcgtgttctctcgccatgaaactggggtcactcatgtgctagtgactggaggtgctggatacattggctcacatgctactcttcgtcttctcacggacaactaccgagttaccattgtggataacctttctagagggaacatgggagctgtcagagctcttcagaggctgttcccagagcctgggaggcttcagtttatatacactgatttaggagacgcaaaagctgtgaacaaaatgttttcggagaacgcgtttgatgctgttatgcactttgccgcggttgcttatgttggtgagagcacacaggagccactaaggtactaccacaacataacatcaaatacgttgacagtgcttgaggcaatggcagcacataatgtaaaaactctgatttactcgagtacttgtgcaacatatggtgaacctgacacaatgcctattgtcgaaacaactcctcagatacctatcaatccatatggcaaggcaaaaaagatgtccgaggacatcattcttgatttctcaaagaaatcgaacatggctgtgatgatcttaagatacttcaatgtgattgggtcggaccctgagggacgccttggggaagctccaaggcctgaactgcgtgagcatggaaggatttctggtgcgtgttttgacgcagcatcaggaatcattccagggctaaaggttcgaggaacggactaccctactgctgatggaacatgcgtaagggactacatagatgtcactgatcttgttgatgctcatgtcaaagctcttggtaaagctgagcctaacaaagttgggatctacaacgtcggcacggggaaaggtaggtcagtgaaggagtttgtagaagcgtgcaagaaggcgaccggagtgaccatcaaggtcgactacctcgaccggagacccggggactacgccgaagtgtacagcaacccgtccaagatccgcgacgagctgaactggacagcccaacacacggacctccgcgagagcctcgcgacggcctggaaatggcagaaggcgcacccgggcggatacggctcggcctgatccggtgctcagcaggttcaggctcaa

SEQ ID NO: 1931 - DNA, 1766 bp, Triticum aestivum
ccgatctgctcgcaagattcgtaggccggaggaggaggacgaggaagggaggaagttgagttcttgttggtttcttccgcgggagccgaccgcacatgccaacaaccccccggagcagaagccaagctaggaccaccaggtcttggatcttgtcaggcatggacttcggtgacacgagacgcaagcctaatttcgccggaaagatcgcggtggctgctgccctcactgtcatgtgcatacttgtgttgaagcagtctcctggttttggcggtactagcgtgttctctcgccatgaaactggggtgactcatgtgctggtgactggaggtgctggatacattggctcacatgctactcttcgtctccttacggacaactaccgagttaccattgtggataacctttcgagagggaacatgggagctgtcagagctcttcagaggctgtttccagagcctgggaggcttcagtttatatacactgatttaggcgatccgaaagctgtgaacaaaatgttttcggagaacgcgtttgatgctgttatgcacttcgctgctgttgcttatgttggtgagagcacgcaagagccactaaggtactaccacaacataacatcaaatacgttgacagtgcttgaggcaatggcagcacataatgtaaaaactctgatttactcgagtacttgtgcaacatatggtgaacctgacacaatgcctattgtagaaacaactcctcagatacctatcaatccatatggcaaggcaaaaaagatgtccgaggacatcattctagatttctcaaagaaatcgaacatggctgtgatgatcttaagatacttcaatgtgattggatcagaccctgagggacgccttggggaagctccaaggcctgaactgcgtgagcatggaaggatttctggtgcgtgttttgatgcagcatcaggaatcattccagggctaaaggttcgaggaacggactaccctaccgctgatggaacttgcgtaagagactacatcgatgtcacagatcttgttgatgctcatgtcaaagctcttggtaaagctgagcctaacaaagttggaatctacaatgtcggcacagggaaaggtaggtcagtgaaggagtttgtagaagcgtgcaagaaggcgaccggagcgaccatcaaggttgactacctcgaccggagacccggggattacgccgaagtatacagcaacccggccaagatccgcgacgagctgaactggacagcccaacacacagacctccgcgagagccttgcgacggcctggaaatggcagaaggcgcacccgggcggatacgggtcggcctgatcccgtgctcggtaggttcaacagaagttcgccaacacagacccacgggtccatgtgcagtgatatagccttgagaacactggtccttcgccgtagacacgtagcaggcagccacagaaggatagtgatgttatttcgcagcacctggaagaagatacagagagaatggcctgcctggcttagaagaaaccgtcatatatattataggtttttccttttcgtcgttgacatttaatttattttgctgttcgttggctgaggcataatatatgacacaaatacggagttgtgctgtagacaagtagatcgatctcatgtacgaggtacgatgtgaagttatgaaccatcacggtggatggatggaatgatacgaataagcagttatttgaacaagctttctgtggtaaatccaaatagtacaatcgttgctca

SEQ ID NO: 1932 - DNA, 1747 bp, Aegilops tauschii
tgctcctcctccccctcacttccctcccccatcttggaccgttgcacaccgatctcgcgccggcccccaaatcgccggcgaagcccgcctccgcctccgtcccccgccgcgccgatctgctcgcaagattcgtaggccggaggaggaggacgaggaagggaggaagttgagttcttgttggtttcttccgcgggagccgaccgcacatgccaacaaccccccggagcagaagccaagctaggaccaccaggtcttggatcttgtcaggcatggacttcggtgacacgagacgcaagcctaatttcgccggaaagatcgcggtggctgctgccctcactgttatgtgcatacttgtgttgaagcagtctcctggttttggcggcactagcgtgttctctcgccatgaaactggggtgactcatgtgctggtgactggaggtgctggatacattggctcacatgctactcttcgtctccttacggacaactaccgagttaccattgtggataacctttcgagagggaacatgggagctgtcagagctctccagaggttgtttccagagcctgggaggcttcagtttatatacactgatttaggcgatccgaaagctgtgaacaaaatgttttcggagaacgcgtttgatgctgttatgcacttcgctgctgttgcttatgttggtgagagcacgcaggagccactaaggtactaccacaacataacatcaaatacgttgacagtgcttgaggcaatggcagcacataatgtaaaaactctgatttactcgagtacttgtgcaacatatggtgaacctgacacaatgcctattgtagaaacaactcctcagatacctatcaatccatacgggaaggcaaaaaagatgtccgaggacatcattctagatttctcaaagaaatcgaacatggctgtgatgatcttaagatacttcaatgtgattggatcggaccctgaggggcgccttggggaagctccaaggcctgaactgcgtgagcatggaaggatttctggtgcgtgttttgatgcagcatcaggaatcattccagggctaaaggttcgaggaacggactaccctaccgctgatggaacttgcgtaagggactacatcgatgtcacagatcttgttgatgcccatgtcaaagctcttggtaaagctgagcctagcaaagttggaatctacaatgtcggcacagggaaaggtaggtcagtgaaggagtttgtagaagcgtgcaagaaggcgactggagcaaccatcaaggttgactacctcgatcggagagctggggattacgccgaagtatacagcaacccggccaagatccgcgatgagctgaactggacagcccaacacacggacctccgtgagagccttgcgacggcctggaaatggcagaaggcgcacccgggcggatacgggtcggcctgatcccgtgctcggtaggttcaacgcaagttcgccaacacagacccacgggtccatgtgcagtgatatggccttgagaacactggtccttcaccgtagacacgtagcaggcagccacagaagtgtagtgatgttatttcgcagcacctggaagaagatacagagagaatggcctgcctggcttagaagaaatcatatatagttttcttttttcttttcttttcgtcagtgacatttaatttattttgctgttcgttggctgaggcataatatatgacacaaatacggagttgtgctgtagacaa

SEQ ID NO: 1933 - DNA, 1801 bp, Avena sativa
ccccccgacgacttgctcctcctcacttccccccttctccccatcacgcggtcagttttgggggcgggtaccgatctcgcgctacccccaaatcgccgttgaagtctgcccccgtcgctggccgcgccgatctgctcgcaaagattcgcaggtaggaggaggacgagaggaagttgagttcttgtttggtttcttccgtggaggccgacctcacatgccaacaacccccaggactagaagccaagctaggaccaccaggtcttggatcttgtcaggtatggacttcggtgacatgaggcgcaagcctaatttcgcgggaaagatcgccgtggctgctgctctcactgtcatgtgcatacttgtgttgaaacagtctcctggttttggcggtactagtgtgttctctcgccatgaaactggtgtgactcatgtgctggtgacaggaggtgctggatatattggctcgcatgctactcttcgtctccttagggataactaccgagttaccattgtggataacctttctagagggaacatgggagctgtcagagttcttcagcggttgtttccagagcctgggaggcttcagtttatatacactgatttaggcgacccaaaagctgtgaacaaaatgttctctgagaatgcattcgatgctgttatgcactttgctgctgttgcttatgttggcgagagcactcaggagccactaaggtactaccacaacataacatcaaatacgttgacagtgcttgaggcaatggcagcacacaatgtaaaaactctgatttactcgagcacttgtgcaacatatggtgaacctgacacaatgcctatcacagaaacaacacctcagatccctatcaatccatatgggaaggcaaaaaagatgtcagaggacatcattctagatttttcaaagaactcaaacatggctgtcatgatcttaaggtacttcaatgtgattggatcagacccagagggactcctcggggaagctccaaggccagagttgcgcgagcacggaagaatttctggtgcttgtttcgatgcagcgtcaggaatcattccagggctgaaggttcgaggaaccgactaccctactgccgatggaacttgtattagggactacattgatgtcacagatctcgtcgatgctcatgtcaaagctcttggtaaagctgtgcctagcaaagttggaatctacaatgttggcacggggcaaggtaggtcagtaaacgagtttgtagaagcgtgcaaggcggcgacaggagctaccatcaaggtcgaataccttacccggagaccaggagactatgctgaagtttacagcaacccgtccaagatccgtgacgagctgaactggacagcccaacgcacggatcttcgcgaaagcctcgcgacggcatggaaatggcagaagacacacccggggggatatgggtcggcctgattatgtgttcagtaggttcagattcagcaaagttgtccaacacgggatccatgtgcagtcatatatacatagccttcagagaactgatcctaccttcacccatagccacataggaggcaagccacggcccacacaagagtagcgatttattttgcagcacctgaaagaagaagatactgacagaacggcatccttatcccttgcttacaaatcaatataggttttcttttcgtcggacgacatttcattggttttgctcgttgctggttgaggcataatgtgtaaacacaaacgagagttgtgtgttgtactagacaactactagatcaaccttatgtactgtatgag

SEQ ID NO: 1934 - DNA, 1763 bp, Secale cereale
tggaccggaccgttgcacaccgatctcgcgcggcgcccaaatcgccggccaagcccgcctccgtctcccgccgcgccgatctgctcgcgagattcgtaggtcggaggaggaggaagttgagttcttttggtttcttcagcgggagccgaccgcacatgccaacaacccccaggggcagaagccaagctaggaccaccaggtcttggatcttgtcaggtatggacttcggtgacacgaggcgcaagcctaatttcacgggaaagatcgcggtggctgccgccctcactgtcatgtgcatacttgtgttgaaacagtctcctggtttcggcagtactagtgtgttctctcgccatgaagttggagtgactcatgtgctggtgactggaggtgctggatacattggctcacatgctactcttcgtctccttgcagacaactaccgagttaccattgtggataacctttcgagagggaacatgggagctgtcagagctcttcagaggctgtttccagagcctgggaggcttcagtttatatacactgatttaggcgatccgaaagctgtgaacaaaatgttttcggagaatgcgtttgatgctgttatgcactttgctgctgttgcttatgttggtgagagcacacaagagccactaaggtactaccacaacataacatcaaatacgttgacagtgcttgaggcaatggcagcacataatgtaaaaactctgatttactcaagtacttgtgcaacctatggtgaacctgacacaatgcctattgtagaaacaactcctcagatacctatcaatccatacgggaaggcaaaaaagatgtccgaggacatcattctagatttctcaaagaaatcaaacatggctgtgatgatcttaagatacttcaatgtgattggatcagaccctgagggacgcctcggggaagctccaaggcctgaactgcgtgagcatggaaggatttctggtgcgtgttttgatgcagcatcaggaatcattccagggctaaaggttcgaggaacggactaccctacggctgatggaacttgcgtaagggactacatcgatgtcacagatcttgttgatgctcatgtcaaagctcttggtaaagctgagcctagcaaagttggaatctacaatgtcggcacagggaaaggtaggtcagtgaaggagtttgtagaagcgtgcaagaaggcgaccggagcgaccatcaaggtggactacctcgaccggagacccggggactacgccgaagtatacagcaacccggccaagatccgcgacgagctgaactggacagcccaacacacggacctccgcgagagccttgcgacggcctggaaatggcagaaggcgcacccgggcggatacgggtcggcctgatccggtgctcggcaggctcaggctcaacaagagttctcccacacagatccatgggtccatgtgcagtgatatagcctcgagagaacactggtccttcaccatagacacgtagcaggcagccacagaagagtagtgacgttattttgcagcacctggaagaagaagaagacacagagagaatggcctgcctggcttaggagaaatcatcatatatatagtttttttttcctttcgccgttgacatttaattcatttcgctgttcgctggctgaggcgttatatatgacacgaaaaatggacttgtgctgtagacgactagatcgatctcatgtatgaggcacgatatggaatgatataaataagtactgt

SEQ ID NO: 1935 - DNA, 1773 bp, Secale cereale
tcttggaccggaccgttgcacaccgatctcgcgcggcgcccaaatcgccggccaagtccgcctccgtctcccgccgcgccgatctgctcgcgagattcgtaggtcggaggaggaggaagttgagttcttgttggtttcttcagcgggagccgaccgcacatgccaacaacccccaggggcagaagccaagctaggaccaccaggtcttggatcttgtcaggtatggacttcggtgacacgaggcgcaagcctaatttcacgggaaagatcgcggtggctgccgccctcactgtcatgtgcatacttgtgttgaaacagtctcctggtttcggcagtactagtgtgttctctcgccatgaagttggagtgactcatgtgctggtgactggaggtgctggatacattggctcacatgctactcttcgtctccttacagacaactaccgagttaccattgtggataacctttcgagagggaacatgggagctgtcagagctcttcagaggctgtttccagagcctgggaggcttcagtttatatacactgatttaggcgatccgaaagctgtgaacaaaatgttttcggagaatgcgtttgatgctgttatgcactttgctgctgttgcttatgttggtgagagcacacaagagccactaaggtactaccacaacataacatcaaatacgttgacagtgcttgaggcaatggcagcacataatgtaaaaactctgatttactcaagtacttgtgcaacctatggtgaacctgacacaatgcctattgtagaaacaactcctcagatacctatcaatccatacgggaaggcaaaaaagatgtccgaggacatcattctagatttctcaaagaaatcaaacatggctgtgatgatcttaagatacttcaatgtgattggatcagaccctgagggacgcctcggggaagctccaaggcctgaactgcgtgagcatggaaggatttctggtgcgtgttttgatgcagcatcaggaatcattccagggctaaaggttcgaggaacggactaccctacggctgatggaacttgcgtaagggactacatcgatgtcatagatcttgtggatgctcatgtcaaagctcttggtaaagctgagcctagcaaagttggaatctacaatgtcggcacggggaaaggtaggtcagtgaaggagtttgtagaagcgtgcaagaaggcgaccggagcgaccatcaaggtggactacctcgaccggagacccggggactacgccgaagtatacagcaacccggccaagatccgcgacgagctgaactggacagcccaacacacggacctccgcgagagccttgcgacggcctggaaatggcagaaggcgcacccgggcggatacgggtcggcctgatccggtgctcggcaggctcaggctcaacaagagttctcccacacagatccacgggtccatgtgcagtgatatagcctcgagagaacactggtccttcaccatagacacgtagcaggcagccacagagggaggagtagtgatgttactttgcagcacctggaagaagaagacacagagagaatggcctgcctggcttaggagaaaccatcatatatatagtttttttttccttttcgccgttgacatttaattcatttcgctgttcgctggctgaggcgttatatatgacacgaaaaatggacttgtgctgtagacgactagatcgatctcatgtatgaggcacgatatggaatgatataaataagtactgtggta

SEQ ID NO: 1936 - DNA, 1648 bp, Avena sativa
cccatcacgcggtcagttttgggggcgggtaccgatctcgcgctacccccaaatcgccgttgaagtctgcctccgtcgctggccgcgccgatctgctcgcaaagattcgcagataggaggaggacgaggggaagttgagttcttgtttggtttcttccgtggaggccgacctcacatgccaacaacccccaggactagaagccaagctaggaccaccaggtcttggatcttgtcaggtatggacttcggtgacatgaggcgcaagcctaattttgcgggaaagatcgccgtggctgctgctctcactgtcatgtgcatacttgtgttgaaacagtctcctggttttggcggtactagtgtgttctctcgccatgaaactggtgtggctcatgtgctggtgacaggaggtgctggatatattggctcgcatgctactcttcgtctccttagggataactaccgagttaccattgtggataacctttctagagggaacatgggagctgtcagagttcttcagcggttgtttccagagcctgggaggcttcagtttatatacactgatttaggcgacccaaaagctgtgaacaaaatgttctctgagaatgcattcgatgctgttatgcactttgctgctgttgcttatgttggcgagagcactcaggagccactaaggtactaccacaacataacatcaaatacattgacagtgcttgaggcaatggcagcacacaatgtaaaaactctgatttactcgagcacttgtgcaacatatggtgaacctgacacaatgcctatcacagaaacaacacctcagattcctatcaatccatatgggaaggcaaaaagaatgtcagaggacatcattctagatttttcaaagaactcaaacatggctgtcatgatcttaaggtacttcaatgtgattggatcagacccagagggactcctcggggaagctccaaggccagagttgcgcgagcacggaagaatttctggtgcttgtttcgatgcagcgtcaggaatcattccagggctgaaggttcgaggaaccgactaccctactgccgatggaacttgtattagggactacattgatgtcacagatctcgtcgatgctcatgtcaaagctcttggtaaagctgtgcctagcaaagttggaatctacaatgttggcacggggcaaggtaggtcagtaaacgagtttgtagaagcgtgcaaggcggcgacaggagctaccatcaaggtcgaataccttacccggagaccaggagactatgctgaagtttacagcaacccgtccaagatccgtgacgagctgaactggacagcccaacgcacggatcttcgcgaaagcctcgcgacggcatggaaatggcagaagacacacccggggggatatgggtcggcctgattatgtgttcagtaggttcagattcagcaaagttgtccaacacgggatccatgtgcagtcatatatacatagccttcagagaactgatcctaccttcacccatagccacataggaggcaagccacggcccacacaagagtagtgatttattttgcagcacctgaaagaagaagatactgacagaacggcctccttatcccttgcttacaaatcaatataggttttctttcgtcg

SEQ ID NO: 1937 - DNA, 1771 bp, Secale cereale
cccatcttggaccggaccgttgcacaccgatctcgcgcggcgtccaaatcgccggccaagtccgcctccgtctcccgccgcgccgatctgctcgcgagattcgtagtaggtcggaggaggaggaagttgagttcttgttggtttcttcagcgggagccgaccgcacatgccaacaacccccaggggcagaagccaagctaggaccaccaggtcttggatcttgtcaggtatggacttcggtgacacgagacgcaagcctaatttcacgggaaagatcgcggtggctgccgccctcactgtcatgtgcatacttgtgttgaaacagtctcctggtttcggcagtactagtgtgttctctcgccatgaagttggagtgactcatgtgctggtgactggaggtgctggatacattggctcacatgctactcttcgtctccttacagacaactaccgagttaccattgtggataacctttcgagagggaacatgggagctgtcagagctcttcagaggctgtttccagagcctgggaggcttcagtttatatacactgatttaggcgatccgaaagttgtgaacaaaatgttttcggagaatgcgtttgatgctgttatgcactttgctgctgttgcttatgttggtgagagcacacaagagccactaaggtactaccacaacataacatcaaatacgttgacagtgcttgaggcaatggcagcacataatgtaaaaaactctgatttactcaagtacttgtgcaacctatggtgaacctgacacaatgcctattgtagaaacaactcctcagatacctatcaatccatacgggaaggcaaaaagatgtccgaggacatcattctagatttctcaaagatatcaaacatggctgtgatgatcttaagatacttcaatgtgattggatcagaccctgagggacgcctcggggaagctccaaggcctgaactgcgtgagcatggaaggatttctggtgcgtgttttgatgcagcatcaggaatcattccagggctaaaggttcgaggaacggactaccctacggctgatggaacttgcgtaagggactacatcgatgtcacagatcttgtggatgctcatgtcaaagctcttggtaaagctgagcctagcaaagttggaatctacaatgtcggcacagggaaaggtaggtcagtgaaggagtttgtagaagcatgcaagaaggcgaccggagcaaccatcaaggtggactacctcgaccggagacccggggactacgccgaagtatacagcaacccggccaagatccgcgacgagctgaactggacagcccaacacacggacctccgcgagagccttgcgacggcctggaaatggcagaaggcgcacccgggcggatacgggtcggcctgatccggtgctcggcaggctcaggctcaacaagagttctcccacacagatccacgggtccatgtgcagtgatatagcctcgagagaacactggtccttcaccatagacacgtacgtagcaggcagccacagaggagtagtgatgttacttgcagcacctggaagaagacacagagagaatggcctgcctggcttaggagaaatcatcatatatatagttttttcctttcgccgttgacatttaattcatttcgctgttcgctggctgaggcgtaatatatgacacgagacacggacttgtgctgtagacgactagatcgatctcatgtatgaggcacgatatggaatgatataaataagtactgtggt

SEQ ID NO: 1938 - DNA, 1841 bp, Festuca arundinacea
tggacagttgggccgcgtaccgatctcgcgctgccctcaaatcgccggggaagtctgcctccatctctgcccgcgccgatctgctcgtaagattcgcaggtcggaggaggacgagaggaagttgagttcttgtttggtttcttgtgtggaggccgacctcacatgccaacaacccccaggagcagaagccaagctaggaccaccaggtcttggatcttgtcaggtatggacttcggtgatgcgagacgcaagcctaatttcgcgggaaaggtcgccgtggctgttgctctcactgtcatgtgcatacttgtgttgaaacagtctcctggttttggcggtactagtgtgttctctcgccatgaaactggtgtgactcatgtgctggtgacgggaggtgctggatacattggctcgcatgctactcttcgtctccttagggataactatcgagttaccattgtggataacctttctagagggaacatgggagctgtcagagttcttcagcggttgtttccagaaccagggaggcttcagtttatatacactgatttaggtgacccgaaagctgtgaacaaaatgttttctgagaacgcattcgatgctgttatgcactttgctgctgttgcttatgttggtgagagcactcaggaaccactgaggtactaccacaacataacatcaaatacgttgacagtgcttgaagcaatggcagcacataacgtaaaaaccctgatttactcgagcacttgcgctacatatggcgaacctgagacgatgcctatcacagaaacaacgcctcagattcccatcaatccatatggaaaggcaaaaaagatgtcagaggacatcattctagatttttcaaagaactcaaagatggctgtcatgatcttgagatacttcaacgtgattggatcagatcctgagggacgccttggggaagctccaaggccggagttgcgtgagcatggaaggatttctggtgcttgtttcgacgcagcgtccggaaccattccagggctcaaggttcgaggaaccgactacactactcctgatggaacttgtgttagggactacatagatgtcacagatcttgtcgatgcccatgtgaaagctcttggtaaagctgagcctggcaaagttggaatctacaatgtcggcactgggcaaggtaggtcagtgaaggagtttgtagaagcgtgcaaggcggcgacaggagctcccatcaaggtcgaataccttgaccggagacccggggactatgccgaagtttacagcaacccgtccaagatccgcgacgagctgaactggacagccaaacgcacggatcttcgtgaaagcctggcgacagcatggaagtggcagcagacacacccgggcggatacgggtcgacctgattcagtgctcagtaggttcagactcaacgaagttgtcccgacacagatccatgtgcagtcatatatatagccgtgagaaaactgatccttcaccgtagacgtgtagtggcagccagagcccacagaggagtagcgatttattttgcagcacgtgaaagaagaagaaaaggaagatacagagagaatggccccctatccctcttgcttaggaatcatatatatacttttctttttgtcgtcagtcatttcattggttttgatggtcactgtctgaggcataatctataacagaacagaaacacagagttgcgctgtagacaactagatcagtctaataatgggtatgagctatgattgatatgaagattcaaaaaaaaatttaaaaaaaccccccccccccccccccccccccccccccccccccccccccccccccccct

SEQ ID NO: 1939 - DNA, 1602 bp, Festuca arundinacea
acgacttgctcctcctcacttccccccttctcccatcgtggacagttgggccgcgtaccgatctcgcgctgccctcaaatcgccggggaagtctgcctccatctctggccgcgccgatctgctcgtaagattcagaggtcggaggaggacgagaggaagttgagttcttggttggttcttgcggggaggccgacctcacatgccaacaacccccaggagcagaagccaagctaggaccaccaggtctgggatcttgtcaggtatggacttcggtgatgcaagacacaagcctaatttcacgggaaaggtcgccgtgggtgttgctctcactgccatgtgcatacttgtgttgaaacaggctcctagttttggcggtactagtgtgttctctcgccatgaaactggagggactcatgtggtggtgacgggaggcgctggatacattggctcgcatgctactcttcgtctccttagggataactatcgagttaccattgtggataacctttcaagagggaacatgggagctgtcagagttcttcagcggttgtttccagaaccagggaggcttcagtttatatacactgatttaggcgacccaaaagctgtgaacaaaatgttttctgagaacgcattcgatgctgttatgcactttgctgctgttgcttatgttggtgagagcactcaggaaccactaaggtactaccacaacataacatcaaacacgttgacagtgcttgaggcaatggcagcacataacgtaaaaactctgatttactcgagcacttgtgctacatatggtgaacctgagacaatgcctatcacagaaacaacacctcagattcccatcaatccatatgggaaggcaaaaaagatgtcagaggacatcattctagatttttcaaagaactcaaagatggctgtcatgatcttgagatacttcaacgtgattggatcagacccagagggacgcctcggggaagctccaaggccggagttgcgtgagcatggaaggatttctggtgcttgtttcgacgcagcgtcaggaatcattccagggctcaaggttcgaggaaccgactacactactcctgatggcacttgtattagggactacatagatgtcacagatcttgtcgatgcccatgtgaaagctcttgggaaagctgagcctggcaaagttggcatctacaatgtcggcactgggcaaggtaggtcagtgaaggagtttgtagaagcgtgcaaggcggcgacaggagctcccatcaaggtcgaataccttgaccggagacccggggactatgccgaagtttacagcaacccgtccaagatccgtgacgagctgaactggacagccaaacgcacggatcttcgcgaaagcctggcgacagcatggaaatggcagaagacacacccgggcggatacggggcgacctgattcagggctcactaggctcagattcaacgaagttgtccaacagaggtccatatgcagtcctatatatagccttgagaaaactgatccttcaccatagacccgtaggaggcagccagagcccacagaagagtagttatttatttgcagcacttgaaagaagaaga

SEQ ID NO: 1940 - DNA, 1654 bp, Brachypodium distachyon
tcggaatcaaccgtgtcaccggaacgatgccgaggattaaactacgtgattaccaggaacctagtcttgaatcaaccaaacctttttggttaataggcggtatggacatcgcgagacgcaaacctaatttcgtgggaaaggtcgctgtggctgccgccctcactgtcatgtgcatacttgtattgaaacagtctcctggtttcggcggtactagtgtgttctctcgccatgaaactggggtgactcatgtgctggtgacaggaggtgctggatacatcggctcgcatgctacccttcgtctccttacggacaattaccgagttaccattgtggataacctttctagagggaacatgggggctgtcagagttcttcaacggttatttccagaacctgggaggcttcaatttatatacactgatttaggcgatccgaaagctgtgaacaaaatgttttctgagaacgcattcgatgctgttatgcactttgctgctgttgcttatgttggtgagagcacgcaggagccactcaggtactaccacaacataacatcaaatactttgacagtgcttgaggcaatggcagcatataatgtaaaaactttgatttactcgagtacttgcgcaacatatggtgagcctgacacaatgcctattaccgaaacaactcctcagaatcctatcaatccatatgggaaggcaaagaagatgtcagaggacataattttagatttctcaaagaaatcggacatggctgtcatgatcttaagatacttcaatgttattggatcagaccctgagggacgccttggggaagctccgaggccagagttgcgtgagcacggaaggatttctggtgcttgtttcgatgcagcatcaggaaccattccagggctaaaggttcgaggaactgactacccgactgctgatggaacttgcataagggactacatagatgtcacagatcttgttgatgctcatgtcaaagctcttggtaaagcagagcctaaaaaagttggaatctacaatgttggcacagggcaaggtaggtcggtgcatgagttcgtagaagcatgcaagatggcgaccggagctaccatcaaggtcgaattactttcccggagaccaggagactatgctgaggtttacagtgacccgtccaaaatccgcgacgagctgaactggacagctcgccacacagatcttcgcgaaagccttgcaaccgcatggaaatggcagaagacacaccctggcggatatgggttgacctgattcagtgctcagtaggttcagattcgacggtgttcttccaacacaggttcatggatccttgtgcagtgatgcagccttcaggaaactggcccttcattcaatagacgctttgcaggtagccacagaagagtaatgtataacttgcagcacctggaagaagatacagagaatgcctccccatcccttgcttagaatcatactataggttttcttttccgttgttttacatttcattgattttggcatccactggctgaagcatgatataataacacatacaaagttgtggtgtagagaacgagatcaatcttatattatgaactatgatatgaacctttacagtggtggatggcatgatataagtacgagtagatattcactcc

SEQ ID NO: 1941 - DNA, 2318 bp, Oryza sativa
attaaaatctagtcccaaagcagggagtacaaatttgacttttcaaaaattcccctacatggctgtactgtacgtagggtccgagtaactgacagcgacgttaatttcgaaaataaagaaagcccgagaagtaaaaatggaccaaactgttgcgccaccgtctattactctccttccctctcctctcctctcctctctcgccatctctctctcctccgatctgcgcagccagccggagccaccgccgcctctctgtcgccgcctcgcccgcgggggctccggcgaacgggccgcccgcctcgacctcccctccttcccgtcgccgagctagcctctccacgctgcgcggggccgcctccggcgagcaggctgggcctcgggcctcggggcctcattccaccgccctgcgcctctcggttcggatcggcttgaaggtgaaggtatggacttcggtgattctagacgcaagcctaatgtcgtcgggaagttcaccgtagctgttgcactcacggtcatgtgcatcattgtgttgaaacagtcgcctggttttaccagtacaagtgtgttctctcgccatgaaattggtgtgactcatgtgttggtgactggaggagctggatacattgggtcacatgctactcttcgtctacttagggacaactaccgagttaccattgtggataacctttctagagggaacatgggagctgtcagagtccttcaacgtttgtttccagagcctgggaggcttcagtttatttatgctgatttaggcgatgcgaaagctgttaacaaaatattttcagaaaatgcattcgatgctgttatgcactttgctgccgttgcttacgttggtgagagcacgttggagccactgaggtactaccacaacataacatcaaatacattgacagtgcttgaggcaatggcagcatataatgtaaaaactctgatatactcaagtacttgtgcaacatatggtgaacctgacacaatgcctatcacagaagcaacccctcagaatcctatcaatccatatgggaaggcaaaaaagatggcagaggacatcattttagatttctctaagagatcagaaatggcagtcatgatcttaagatacttcaacgtcattggatcagacccaggggggcggttaggggaagctccacgaccagagctgcgtgagcatggacggatttctggtgcttgctttgatgcagcactgggaatcattccaggtttgaaggttcggggaactgattaccctacagctgatggaacttgcataagggactatattgatgtcacggatctcgttgatgctcatgtgaaagctcttgataaagctcagcctggcaaagttggaatctacaatgttggcacaggacatggtagatcagtgaaggagtttgtagaagcatgtaagagcgcaacaggagctagcatcaaggtttcattccttacccggagaccaggagactatgctgaagtttacagtgacccatccaaaatccatgacgagctgaactggacagcccgttacattgatcttcgcgaaagcctttcaactgcatggaaatggcagaaagcacacccgaatgggtatggatcggcctgattcagggtttaatagattcagacttaaggtacacagattctcaggtccatgtgcagaaatcatatatccttcagaaaattggttcttcagcacaaacatagtgccaggcacagaagtgttctgaatttttttggcagcatttggaagaagatacagaaagaatggcccctctattcctggcttaggatcatacatatagttttttttttccttgacattttttttaatcttttctactcgttaaagcataatataataaccaatagaaaatgtgttgtagacaaggtagataactatcatgtatgaacgttcatggtgttgaatgaaaggatatatgaataagtagatgtttgcttattagtggaagttaaatttccattttggcaagctcagcggttaaatttcttgtatgtgaagcaaggggtgactggggacaatgcattgctgtgcacaactcctggtctcacttgcaaaaacatttcttacatgtaactagagtacaagtggttggattataccgtatgtacatgaacgtcaattcgcagctacacttcttcaaagagaagattaattatgtactacatgttattcgcaactacagttcttcagaagagaagaacaaacaatgcaatggtaagcacctctaccgcgtattctgaagaaaacgaaaagagaagagaagaataaagaaagaaagggc

SEQ ID NO: 1942 - DNA, 2262 bp, Musa acuminata
ctccaacatggacgcaaactcctccaccacctactcaaaaagccaggattaagattcctgattcttgagggctgtgtctcgtccgtcgaagaagaacatgggacgaggaagagagtgagtgacatcttggaaatttctattctctcctccatccttctcttctctgtgtctgtgcctccccccgtctcctctgaaaagtccaccaagacgcggtccaaactccatatactctgcacgcatctcgccttctcctcccccgttcctcttatcctgcctcgccaggtacctgaccctcgccaagacccgattttgatcgcctcttcttgctctccgatgggtttcttcgtaggggtggctgctgttttgggttctctcgatcaggtttttgtgctgttttgtttggcttcggatgtggcctcgatgtttctgttccgtcgttggtggtccggtttggaagggtgtcaagattcctaaaggcggcattttgatgtcgttttgaattggtctacctttttagggcggctggattcgtttgacttcgaggttccgtgttctcttgatctatccgcctcctctcggtttgggccttcttgtaggtagggttcggtttgtgttgccgatccgtggtctctcttctccctagtttgctaaattacggtgcgtcttggttcagtctacatgaaagttcgaatcttttatcggctctgtgatgaaagatgagatttttctgttttgtttgaaggaatagctaagaagaatcttgccgatcttcttcgctaaggatcttcctcacatgctacccagcaacagaagtagaagtcagcccagggctgttagaccttggcccctttcaggaatggactactcagattcaagacgtaaacctcatattcttgcaaaacttcttatggtggtcattcttacagccttctgcgtactaattttaaagcagtccccgagttttagcggtactagtgtgttctctcgtcatgaacctggcgttactcatgtcttagtgacaggcggtgctggctatattggttcgcatgctacacttagactcctgaaagactcgtatcgagttacaatagtggataacctttccagaggtaatcttggagctattaaggttcttcagcagatgttcccagagcctgggagacttcaatttatttatgctgacttaggggatgccagagctgtcaaccgcatatttgctgaaaatgcatttgatgctgttatgcactttgctgcagttgcttatgtaggggaaagcacacttgaacctctcaggtactatcacaatatcacagcaaataccttggtgattcttgaggcgatggcagcgcatggtgtaaaaactcttatttactcaagtacatgtgctacttatggagaaccagaaaaaatgcctatcacagaagaaactcctcagctacctatcaacccatatgggaaggccaaaaagatggcagaggatatcattttggatttctcaaagagatccaacatggcagtcatgatcctaagatatttcaatgtcatcgggtcagatccagagggaagattaggtgaagccccgagacctgaactacgagaacatgggcgtatatctggtgcttgctttgatgcagcactaggtatcataccagggttgaaggttaaaggaacagactacccaacaagtgatggaacttgcatcagagactatattgatgttactgatctcgttgatgctcatgtgaaggcccttgacaaggcaaagcctagcaaagttggcatattcaatgttggtactggaaaaggtagatctgtgaaggaatttgtggaggcctgcaaaaaggcaactggggtgaacattaaagtggattatctcgaacgcagaccaggggattatgccgaagtttatagtgatccttcaaaaatcaatcatgagctcaactggaccgcgcgctacaccgatcttcaggagagcctctcgatcgcatggaggtggcagaaatcacatccaaatggttacgggacacgatcggtcatggctgtttgatcatctcttgtagatgtgggtttccgttgtaagtcattttacggggtcatcattgcttgctttgatgagaagaggagtcgggtttgtgggggcattgaaaaaggattgagacataaattagaaatatgatcttaccatagaaaaggtaggaatggagatgatttgttatttttacaagtgctaggaggaacccaataaagaacggagttgatagt

SEQ ID NO: 1943 - DNA, 1987 bp, Panax ginseng
aagcagtggtatcaacgcagagtacgcggggacgcttaaaataacatggcagcggagaaatgtccgcaattacagacctttctctattcaattcaaaacgtacacacgcagaagagcagagtagagagggacctggtccaatacacccagtcctctctttaagaatctgcttcgtgggttttactcaaaatatagtcttcgattctccgatcaatacactgtattgaactcgtcgtcttcattttttattcgaagcaattttgcgtgcccctttgcttttcatagatcttgcagagcatttatatgagcgttatatatagcagatttcatcaaatttgcagccaacaagggattttattgatcattgatctgaaagagtgattttgttacctactttgtttagcatttattctgcaaatgctaaatttaaataggtcaagaactcagacaaggactaatcgatctatgtctttaggaggcatggactttgttgatccgaagaagaagagcaattttataggaaagattcttttggctgctttcttaacagcattatgcattcttgtgcttaaacaatctccaagtttcaactctccaagcgcattctctcgtcatgaagcagggattacacatgttctagtaacaggaggtgctggctatattggttctcatgctgcactacggcttttgaaagatttttaccgtgtaactatagtggacaatctctctcggggaaacctaggtgccatcaaagttctacaaaacctatttccagaacctgggagacttcaatttatatatgccgacttgggagatgctaaggctgtgaacaaaatattttcagaaaatgcttttgatgctgtgatccattttgcggctgtagcatatgttggcgagagcacccttgatcctcttaagtattatcataatattacatcaaataccctggtggtgttggaggctatggcagcacatggcgtgacaactctgatatattcaagtacgtgtgcaacctatggggagcctgaaaagatgccaatcacagaagaaactcctcagtttccaattaatccatatggaaaagccaagaaaatggcagaagatatcatcttggatttccataagaactcgaacatggctgtcatgatcttaagatacttcaatgtaattggatcagatccagagggaagacttggagaagctcccagaccagaactacgtgagcatggacggatatcaggtgcttgctttgatgcagctcgtggtattattcctggacttaaggttagaggaacagattataaaactgcagatggcacttgcatacgggactacattgatgttactgatctggttgatgctcacgtgaaagcccttgaaaaggcagaacctcaaaaagttggaatctataatgttggaactggaagaggtagatcagtaaaggaatttgttgaggcttgtaagaaggcaaccggagtatctatcaaagttgatttccttgcccgtcggcctggtgactatgctgaagtgttagctgaccccacaaagatcttccgtgagctaaactggaccgcgcaatacactgatcttcaagaaagtttgcaggtggcatggagatggcaaaaatcacatcgtaacggttacggcccggcaggtggcatggagatggcaaaaatcacatcgtaaaggttacagcccggctagtttggtaacatcttcataatacagtttagtggaatactaggttgacccccccaatgcagagcctgattttgcctcaattctattactaatctcttggaataagggttttgaagggtaggggttttgatatagttctcacataatatctaattatctattaaattattaatattattgtaattatacgggttagatggtttaggagacttgccatatgtaattctgacaggtaaattagtttaataataataataataccgctcggtatagctttacaattgcc

SEQ ID NO: 1944 - DNA, 1719 bp, Musa acuminata
gttgatgaaaagtccaccacgactcggtccggaattgtatgactcgcctgccgcttttaattgtcgcccggcttctctgtgtctgtgcctctgccccctccctcagctgcccctcttgcgtcgccagctctcttgatctgactggcaattagaggttgggttcgttggaaaagaggaaactgatctaattcaccctcgtgcttattatgaaggaaaatcctcaaatgctacccaccaacaggagtagaactcaacccagggctgttagaccttggcccctttcagggatggacaactccgattcaaggcgcaagcctcatgtttatggaaaacttctgatggcagttattctgacagccttctgcatactgattttaaagcaatccccgaattttagtggcagtaatgtgttttctcgtcatgaacctggggtaactcatgtcttagtaacaggcggtgctggctatattggctcgcatgctgcacttcgactcctaacagactcataccgtgttacaattgtggataacctttccagagggaatcttggggctattagggttctccagcagctgtttccagagcctggaagacttcagtttatttttgctgatttaggggatgcaagagctgtcaacaggatatttgctgaaaatgctttcgatgctgttatgcactttgcagctgttgcttatgtaggggaaagcacacttgaacctcttaggtactatcacaacatcacggcaaatactttggtaattcttgaagctatggcagcacatggcgttaaaactcttatttactcgagtacctgtgctacttatggagaaccagaaaagatgcctattacagaagaaactcctcagcttcctatcaacccatacgggaaggccaagaaaatggcagaggacatcatcttggatttttcgaagagatcagacatggcagtcatgatcttaaggtatttcaatgtcataggctcagatccagaaggaagactaggtgaagctcctagacctgaactaagggagcatggacgtatatctggtgcgtgcttcgatgcagcactaggtatcataccagggttgaaggttaaaggaacagactacgcaacaagtgatggaacttgtatcagagactatatcgatgtcactgaccttgttgatgctcatgtgaaagctcttgacaaggcaaggcctaacaaagttggcatatacaacgttggtactggaaaaggaaggtcagtcaaagaatttgtcgaggcctgcaagaaggcaactggggtgaacatcaaagttgactaccttgaacgtagaccaggggactatgccgaagtctacagtgacccttcaaaaatcaattcggagctcaactggaccgcacattacaccgatcttcaaaagagcctctcaaccgcatggagatggcagaaatcacatccgaatggttatcggtcaccatcggccatggctgtttgatcaactgttccactcgattatacatattagatttcatgaagatgtaagcttctgatagaagtcattagcaaccttcattgcttagattaatgatgagggtggtcttggcaagcatagaggaaggattcaatcactcgcgaagtcttatcatactgagtgtaggaatcgagataaaaatgtgttatttttacaaaggttatgcagaagccattaaagaacagagctcatagttgtaatcccc

SEQ ID NO: 1945 - DNA, 1719 bp, Cocos nucifera
ttccccagttgtctctcttttctcctccctccctctcttccaacccctctaaagacaacgagtgggtccaaacgaccaacgaacctctcttcttctccgccctacctcttctcctttcccttctgctgctctacttcttccaggtgtctatttcccctttctgcctgtcttcgaaccctctaaagaccacgggtgggtccaaacgaccaacgaacctctcttcttcttcgccctacctcttcccctttcccttctgctgctctactgcttccagctaccttgctctggcgggtgatcaccagtttacatcacagcagaagagggatctccatcgccctgtattctgtgtcagagtcgttgtttgattctcgtgtcgtagtctgaaagttctttctcccatgctacctgtcaacaggagtagaaatcagcctcgggctggtagatcttggcccttttcaggaatggattactcagattcaagacacaagcctcattttcttggaaaagttcttatggctgctattctcacagccttgtgcatatttattttgaagcaatcccctggcttcagtgatgatggtgtgttttctcgtcatgaacctggggtaacccatgtgttagtaacaggtggtgctggatatattggctcacatgctgcacttcgactcttgaaggactcatatcgggtgacagttgtggataacctttctaggggaaatattggagcaattaaggttctccaggagctattcccagagccagggagacttcaatttatttatgctgatttgggcgatgcaaaagctgtcaaccaaatatttgcgcaaaatgcatttgatgctgttatgcactttgcggctgttgcatatgttggggaaagtacccttgaacctcttaggtactatcataatatcactgcaaacacattggtcatcctggaggctatggcagcacatggtgttaaaactcttatttactcaagtacatgtgcaacttatggggagcctgaaaaaatgcctattaccgaagaaactcctcagtttcctatcaacccatatgggaaggccaagaaaatggcagaagacatcattttggatttctcaaagaattcagacatggctgtgatgatcttaagatatttcaatgtcattgggtcagatccagagggaaggttgggtgaggctcctagacctgaattacgagagcatggacgtatatctggtgcatgctttgatgcagcattaggaataattccagggctgaaggttaaaggggcagactatcccacagctgatggaacttgtataagagattatattgatgtcactgatctggttgatgctcacgtgaaagctcttgacaaggcaaggcctaacaaagtcagtatatacaatgtcggcactggaaaaggtagatcggttaaggaatttgtggaagcctgcaagaaagctactggggccaacattaaggttgaataccttgagcgtagaccaggtgactatgctgaggtatacagtgacccttcaaagattaatcgtgaactcaactggacggcgcaatacactgatctccaggagagcctttccattgcatggaaatggcagaaatcacatcgcaatggctatggatcaccctcgattacgagtgcttaattcagctttttggatcattgatagccttcggagggtgacatgggctttgagttggaagccctttttt

SEQ ID NO: 1946 - DNA, 1979 bp, Panax ginseng
taagcagtggtatcaacgcagagtacatggggaattacagacctttctctattcaattcaaaacgtacacacgcagaagagcagagtagagagggacctggtccaatacacccagtcctctctttaataatctgcttcgtgggttttactcaaaatatagtcttcgattctccgatcaatacactgtattgaactcgtcgtcttcattttttattcgaagcaactttgcgtgcccctttgcttttcatagatcttgcagagcatttatatgagcgttatatatagcagatttcatcaaatttgcagccaacaagggattttattgatcattgatctgaaagagtgattttgttacctactttgtttagcatttattctgcaaatgctaaatttaaataggtcaagaactcagacaaggactaatggatctatgtctttaggaggcatggactatgttgatccgaagaagaagagcaattttataggaaagattcttttggctgctttcttaacagcattatgcattcttgtgcttaaacaatctccaagtttcaactctccaagcgcattctctcgtcatgaagcagggattacacatgttctagtaacaggaggtgctggctatattggttctcatgctgcactacggcttttgaaagatttttaccgtgtaactatagtggacaatctctctcggggaaacctaggtgccatcaaagttctacaaaacctatttccagaacctgggagacttcaatttatatatgccgacttgggagatgctaaggctgtgaacaaaatattttcagaaaatgcttttgatgctgtgatccattttgcggctgtagcatatgttggcgagagcacccttgatcctcttaagtattatcataatattacatcaaataccctggtggtgttggaggctatggcagcacatggcgtgacaactctgatatattcaagtacgtgtgcaacctatggggaacctgaaaagatgccaatcacagaagaaactcctcagtttccaattaatccatatggaaaagccaagaaaatggcagaagatatcatcttggatttccataagaactcgaacatggctgtcatgatcttaagatacttcaatgtaattggatcagatccagagggaagacttggagaagctcccagaccagaactacgtgagcatggacggatatcaggtgcttgctttgatgcagctcgtggtattattcctggacttaaggttagaggaacagattataaaactgcagatggcacttgcatacgggactacattgatgttactgatctggttgatgctcacgtgaaagcccttgaaaaggcagaacctcaaaaagttggaatctataatgttggaactggaagaggtagatcagtaaaggaatttgttgaggcttgtaagaaggcaaccggagtatctatcaaagttgatttccttgcccgtcggcctggtgactatgctgaagtgttagctgaccccacaaagatcttccgtgagctaaactggaccgcgcaatacactgatcttcaagaaagtttgcaggtggcatggagatggcaaaaatcacatcgtaacggttacggcccggcaggtggcatggagatggcaaaaatcacatcgtaaaggttacagcccggctagtttggtaacatcttcataatacagtttagtggaatactaggttgacccccccaatgcagagcctgattttgcctcaattctattactaatctcttggaataagggttttgaagggtaggggttttgatatagttctcacataatatctaattatctattaaattattaatattattgtaattatacgggttagatggtttaggagacttgccatatgtaattctgacaggtaaattagtttaataataataataataccactcggtatagctttacaattgccagtcgtgggaggcaaggcacacagggg

SEQ ID NO: 1947 - DNA, 2458 bp, Musa acuminata
cacaaatgtctcaatttcttctctctcttcttcccaaccactctaaatggtccacaccgcggcttggtccaatctccccccaaaccttcctcccctcttctcggtccctcctcgctctctctccccctcacctgttcctctattgttgccaggtaccttcgccgttgccaagactcgattttgatcgcgcgttaattctctccggtggatttccctgcgaggatcttgatgtgtttcggttactcttttgcgggtttctttccgtgcgggatgtggcaaccccgtttaggttttttaccgtgtgccgctcgttccttccgggaatggggtcttgttgctcggatcctatgtagagatcttaaaggtggccttttggtttggttggtgcctttcgggcggtggggttcctttggcgttgtgggttcgtgttctcttgatatgtccgcctctttctattggctttctttatctttatgagatcgtctctacttttcggaattgaagcaacctcttctggtttcttcgagtgtaagttgaatctttctttcttctttcagtttacttgtcgtcgttgtacttgttctttcatactatacggagattaggctttcctcgtcgtaggcggaagtatgaattcgcattcttcagtccttgaattcgtaaggtgcttttctcctgaatcttggtgttttctgcggtcttcctctttcaatttttggtagattgagatggctgagactttaatgctgtctatgttaaggtgcatcccaagcctccaaaggggtctgattgattgtcatgctgtgtggaattggtgggcaacttcatgttagttcaaggaaaagagcaatctgttttacccccagtttctctgagggtaccgcatgtttgatccttgtggtttgacttgaagggtcttcctcacatgctacccatcaataggagcagaagtcagtccagggctggtagtccttggtcttttccaggaatggactactcagattcaaggcgcaaaccacaggttgttgcaaaacttgttatggtggctattcttactgccttttgcatattcattttgaagcaatcccctgctttcagtggacctagcctgttttcacgtcgtgaagtcggagcaacccatgttttagtaacaggaggtgctgggtatattggttcacatgctgctcttcgcctattgaaggactcatacagagtaaccatagtggacaacctttctagaggaaatatcggagccatcaaagttctggaggggctgtttccagaacctgggagacttcaatttatttatgctgatttaggcgatgcaagagctgttaacaagatttttgcagaaaacgcgtttgatgcggttatgcattttgcagctgttgcttatgtgggtgaaagtacacttgatcctcttaggtactatcataatatcacagcaaatactttgacacttcttgaggctatgtcagcacatggcgttaaaactcttatttactcgagtacttgtgctacttatggagagccagaaaaaatgcccattacagaaggaacacctcagcttcctatcaacccatatgggaaggctaagaaaatggcagaagatataattttggatttctcaaagaaatcagacatggctgtcatgatcttaagatattttaatgtcatcggatcagatccagaaggaagattaggtgaagcccccagacctgagctaagggagcatggacgaatttctggtgcatgttttgatgcagcactcgggataataccagggttgaaggttagaggaacagactacccgacgaatgacggaacttgtataagagactatatcgatgtcactgatcttgtcgatgcacatgtgaaagcccttgacaaagcaaggcctagcaaagttggcatatacaatgtcggcactggaaaaggcagatccgtcaaagagtttgtcaaagcctgcaagaaagcaactggggtggaggttaaagttgagtatctcagccggaggccaggggactatgctgaggtttacagtgatccatcgaagataaatcaggagctcaactggacagcgcggtatataaatcttcaggaaagcctttcagttgcatggagatggcagaaagcacatcctaatggttatggctcacaatcagtcatcacactttgactcgatccttgcaacaatataattgcgtataattagatttgcatggagttgcagacttcgaataggaagtcgataactgccatctattgcttagcttgatagaagtagcaaatatggttatatttggaaaaacgaagatttggatacagaataagaagtctcatcatacaggtgtggagggagctgtgctaattgcctatcttttttatacagggatagacgagaaacaattaattgttagtgatgaatgctacactttcttgattcatttctgttgta

SEQ ID NO: 1948 - DNA, 1913 bp, Panax ginseng
agagtagagagggacctggtccaatacacccagtcatctctttaataatctgcttcgtgggttttactcaaaatatagtcttcgattctccgatcaatacactgtattgaactcgtcgtcttcattttttattcgaagccaactttgcgtgcccctttgcttttcatagatcttgcagagcatttatatgagcgttatatatagcagattccatcaaatttgcagccaacaagggatattattgatcattgatctgaaagagtgattttgttatagcatttattctgcaaatgctaaatttaaataggtcaagaactcagacaaggactaatcgatctctgtctttaggaggcatggactatgttgatccgaagaagaagagcaattttataggaaagattcttttggctgctgtcttaacagcattatgcattcttgtgcttaaacaatctccaagtttcaactctccaagtgcattctctcgtcatgaagcagggattacacatgttctagtaacaggaggtgctggatatattggttctcatgctgcactacggcttttgaaagatttataccgtgtaactatagtggacaatctctctcggggaaacctaggtgccatcaaagttctacaaaacctatttccagaacctgggagacttcaatttatatatgccgacttgggagatgctaaggctgtgaacaaaatattttcagaaaatgcttttgatgctgtgatacattttgcggctgtagcatatgttggcgagagcacccttgatcctcttaagtattatcataatattacatcaaataccctggtggtgttggaggctatggcagcacatggcgtgacaactctgatatattcaagtacgtgtgcaacctatggggagcctgaaaagatgccaatcacagaagagactcctcagcttccaattaatccatatggaaaagccaagaaaatggcagaagatattatcttggatttccataagaactcgaacatggctgtcatgatcttaagatacttcaatgtaattggatcagatccagagggaagacttggagaagctcccagaccagaactacgtgagcatggacggatatcaggtgcttgctttgatgcagctcgcggtattattcctggacttaaggttagaggaacagattataaaactgcagatggcacttgcatacgggactacattgatgttactgatctggttgatgctcacgtgaaagcccttgaaaaggcagaacctcgaaaagttggaatctataatgttggaactggaagaggtagatcagtaaaggagtttgtcgaggcttgtaagaaggcaaccgaagtatctatcaaagttgacttccttgcccgtcggcctggtgactatgctgaagtgttagctgaccccacaaagatcttccgtgagctaaactggaccgcgcgatacactgatcttcaagaaagtttgcaggtggcatggagatggcaaaaatcacatcataacggttacggcccggcaggtggcatggagatggcaaaaatcacatcgtaaaggttaaggcccggctagtttggtaaacatcttcataatacagtttagtggaatactaggttgaccccccaatgcagagcctgattttgcctcaattctattactaatctcttagaataagggttttgaagggtaggggttttgatatagttctcacataatatctaattatctattaaattattaatatttttgtaattatacgggttagagggtttaggagacttgccatattttattctgacaggtaattagttttataataataataataataccattcaggtatagctttacaattgcctcaactttctttcttttttatgactttatgtgggagcagaactgcctgcc

SEQ ID NO: 1949 - DNA, 1538 bp, Tragopogon dubius
ttgcactcgtctctttggattttacctttttaagagaggaagaattcatcgacagatgctaaactttaacaggtcaagaactcagcggcctaacaggccaaattctttaggaggcatggattttgtggatccagtgaagaaaagtgggttttaagaaagattatttttgctacatgtctgatagtattatgcatcacaataatcaagttatccccatctttcagcagccctagcccattctctcttcatgaaacagggattactcatgtgttagtaacaggaggtgctggttatattggttcacatgcttcactacggcttctaaaggattctcatcgcgtcactatagtggacaatctttctcgtgggaacctaggtgcaattagggttcttcaagacctttttccagaacccggaagacttcaattcatttatgctgacttgggggatccaaaagctgtaaacaaaatcttctcggaaaatgcatttgatgcagttatgcactttgcagcagttgcatatgttggggagagtactcttgatcccctaaagtattatcacaacatcacgtcgaatacactggtggtattggaggctatggcagcacataatgtgaatacttttatatactctagtacatgtgcaacatatggggaacctgataagatgcctattacagaagaaacccctcagcacccaattaacccttatggaaaagccaagaagatggcggaagatattatccttgatttccacaaaaactcagacatggcagtcatgattttaagatacttcaatgtgattgggtcggatccagaggggaggttaggagaggcaccaagaccagaattacgtgaacatggaagaatatcgggtgcatgctttgatgcggcccgtggaattaccaacgggctcaaggttcgaggaaccgattacaaaaccgcagacgggacatgcatacgtgactacatcgacgtgaccgatctagttgatgctcacgtaaaagcactcgggaaagcacagcccggggaagttggaatctacaatgttggtacgggccgtggtagatcggttaacgagtttgttgaagcttgtaaaaaagcaaccggggcatctataaaagttgaatatttgccacgtcgccctggtgactatgctgaagtgttcagtgacccgtcaaagatactccgggaactcaactggtcagcaaagtacacggatcttgaaaagagtttacgggtcgcatggaaatggcaaaagttgcatcataacggatacgggaaccattgaaagttggcattattcttttatttcttacagaaacacatgagtttaacacatattatgtctgttgatttgtagcttgggaaaggggctggtttaaattttcatttgattgtttatgggatagggttgaggttgtaggagggcaacccataagtcatatgcatttgaaattggttaggggagggatctcagttatacatgtttgcttgtattttcattattatcttgctatatacagaaaatttcaggac

SEQ ID NO: 1950 - DNA, 1852 bp, Citrullus lanatus
acctcttgtgcattggacctttatgatttattattctttctgcttttgttgcaggccatcataacaaaataataaccaaggcaagactctagttgtactttgtggtcaagttgcaggctggaaattgctctttaaaacgtaggtcctttagttgaagaaagtggcaaatgctaaattttggcagaagcagaactcaacaaaggtccaccagatctctatcattaggaggtatggattattcagatcccaaaaagaaaaacaatgttgtgggaaaatttattctggctgccactctcacagctttatgcattatcatgcttaagcaatcaccggctttcagtgccccaagccagtttggcctgcgtgagccgggggtaactcatgtactagtaacaggaggtgctggatacattggttcacatgctacactaagacttctgaaggacaattatcgtgtaaccatagtggataacctgtcacgaggaaatcttggtgctgtaaaggttctgcaagaactatttccagaacctgggaggcttcaatttatttatgctgacttgggagacgccaaatctgttaacaagatattttcagagaatgcttttgatgctgtcatgcattttgcagcagttgcttatgtcggtgagagtaccgttgatccactgaagtactatcacaatattacatcaaataccttaacagttatagaggcaatggctgcccatggtgtgaagaaattgatatattcaagtacatgtgccacatatggtgaaccagataaaatgcctatcactgaagaaactccacaagtccctatcaatccttatgggaaggccaagaagatggcagaagatatcataaaagatttttccaaaaactcaaaaatggcggtcatgatcttgcgatacttcaatgtgattggatcagacccagagggtaggttaggcgaagctcctagacccgaacttcgtgagcagggacgaatttcaggggcttgcttcgatgcagctcgcggcattattcctggactcaaggttagaggaacagactaccctacacatgatggaacttgtgtccgagattacattgatgtcactgatctggttgacgctcatgtaaaagctcttgcgaaggcagaagctggaaaagttggaatatataatgttggcactggaaaaggtagatcagttaaggagttcgttgaagcatgcaagaaggcaactggggttactatcaaagttgattatcttgaccgtcgaccgggtgattatgcagaagtctttagtgacccaacaaagataaataaggaacttaactggacagctcagtacacagatcttgaagaaagcttaaaggtagcttggagatggcaaaagtcacatcttaatggttatggaagctcttgaatggctcctccatgaaagaagagagcatttaattgcccaagaaggaaccttgggaaagaccctttgaggtgtcaacttcgtctgtgctttctgttgctacttcagcagctggattgcaagcagagtgatcggaattttttcttttttttttttgtatccaatttttacaaaatgaagtttacattctatgcccttactttattatgtagtagttatactataggaaacagcgcatttgtcacatgaatttgaaacgatatagttgagaaaataaaggatgtctgtgcagaaattgcccttctttctcactcgttccttttccgttcatctctctgcacccttccttcctcatcgagatggtaaaatgaatgcataaattttgccaaatggaaaaatgaaaaatgagttatgcttctgttatgtacttatgtgtgaatgaagccaaa

SEQ ID NO: 1951 - DNA, 1679 bp, Elaeis guineensis
cagctaccttgctctggcgggtgatcaccagtttcacagaagaagagggatctccattgccctatattctgtgtcagagccgtttgtttggttctcgtgtcgtagtctgacagttctttctcccatgctacctgtcaacaggagtagaaatcagcctagggctggtagatcttggctcttttcaggaatggattactcagattcaagacacaagcctcattttcttggaaaagttcttatggctgctatcctcacagctttgtgcatatttattttgaagcaatcccctggtttcagtggtgatagtatgttttctcgtcatgaacctggggtaacccatgtgttagtaacaggtggcgccggatatattggctcacatgctgcacttcgactcttgaaggagtcatatcgagtgacaattgtggataacctttctaggggaaatattggagcaattaaggttctccaggagctattcccagagccagggagacttcaatttatttatgctgatctgggcgatgcaaaagctgtcaaccaaatatttgcacaaaatgcatttgatgctgttatgcactttgcagctgttgcatacgttggggaaagtacacttgaacctcttaggtactatcataatatcactgcaaacacattggtcatcctggaggctatggcagcacatggtgttaaaactcttatttactcaagtacgtgtgcaacttatggggagcctgaaaaaatgcctattacagaagaaactcctcagtttcccatcaacccatatgggaaggccaagaaaatggcagaggacatcattttggatttctcaaagaatgcagacatggctgtgatgatcttaagatatttcaatgtcattgggtcagatccagagggaaggttaggtgaggctcctagacctgaattacgagagcatggacgtatatctggtgcatgctttgatgcagcattaggaataattccagggctgaaggttaaaggagcagactatcccacagctgatggaacttgtgtaagagattatattgatgtcactgatctggttgatgctcacgtgaaagctcttgacatggcaaggcctaacaaagttagtatatacaatgtcggcaccggaaaaggtagatcagttaaggagtttgtggaagcctgcaagaaagctaccggggccaacattaaggttgaataccttgaccgaagaccaggtgactatgctgaggtatacagtgacccttcaaagattaatcgtgaactcaactggacggcgcaatacactgatcttcaggagagcctttccattgcatggaaatggcagaaatcacatcgcaatggctatggatcaccttcagttatgactgcttaattcagctttttgaatcattgataacctttggatggggacatgggctttgagttggaagccctttgctagcagtccttgcttaattttcaggagaagagtatctcaggagcagttaaactggatgtggacatcgtaggagaggcttttacgagcatttcagatgtaggagcacagtccatttattattttttcatgggacagtagaaatctaataatagctcattacacaccattcttgattaatcttccttgtaacatgctcaacaataagttatacaatgaatcaaaaagtgatagttat

SEQ ID NO: 1952 - DNA, 1786 bp, Oryza sativa
cccccaacgaccctcctcccctcccccctcctctccccctcgccgagatatattttcccctcggcggcgactcctcctccacctcgtgagctcgccttcggccgccgcctctgcgcctcgcagatccccacccgcgaccgagcgagctggtgccgcatcggtatcgcatcccgttcatcttctggctggacgaattcaattcacggacggtggtggtggtggtgttgactagggatttatttttttaccattggcggctcggctgcatccccaagtgaagaagagaattcgtacatgattccgctaaacaggagggcgagtcagactaggggtgggatggagtacttcgatgctaggcggaagcctcataatgttgggaaagttattgcagctctggtcctcacaacactatgtatatttattttgaagcaatctcctggttttggtggcagtagtgtgttttctcgccatgaacctggtgttactcatgtcttagtaacaggaggagctggctatattgggtcacatgcttcattacgcctgttaaaggacaattatcgagttaccattgtggacaatctttctagaggaaacatgggagcagtaaaggttctccaagagttgttcccccagccaggaagacttcagtttatctatgctgatcttggagatcaaaaaactgtcaacaagatctttgccgaaaatgcgtttgatgctgttatgcactttgctgctgttgcctatgtgggtgagagtacattggaaccccttaggtactatcacaatattacatcgaacaccttattgattttggaggctatggcgtctcatggagtcaagacccttatttactctagtacatgtgccacctatggagaaccagagaagatgcctattgtagaaaccacacgtcagttaccaattaatccctatggaaaagctaagaaaatggcggaggacatcatactagatttcacgaaggggagaaaggacatggctgtgatgattttaagatatttcaatgttattggatcagacccagagggaagactaggtgaagctcctagacctgaactacgagagcatggaaggatatccggggcatgctttgatgctgcgttaggaatcattccagggctgaaggttaaaggaacagattatcctacaactgatggaacctgcataagagactacattgatgtcacagatcttgttgatgctcatgtgaaagcactcaacaaggcagagccaagtaaagttggcatttacaatgttggcactggaagaggtcgttcagtcaaggagtttgtggatgcctgcaaaaaggcaactggagtcaacattaaaattgagtacctcagcaggaggccaggggactatgctgaagtatacagtgacccaacaaagatcaacacggagctcaactggactgctcaatataccgacctcaaggagagcctgtcagtcgcttggagatggcaaaagtcacatccacgcggatatgggtcaaactaaatatagcttgctgatcaataattctgctgaatcgtcgatatattgatttttttagttagtggtataggatcttggtgcgataccgcttccacagtcactcatttgttatttttttctctttttattttcaaaggtttgttgttattttctagcaaaaccataagcagtgatcttgatatgctggaaatcctggaagccttcctgtaagggcaaatttcattgttttttgacacaaattgctgataaaaagaagtgtacattgtctcttacc

SEQ ID NO: 1953 - DNA, 1811 bp, Sorghum bicolor
ccagccagcggcccagtgccccagcccgccgaaggaccgccactccagacgccttggcgcccccccgcggtgctccgccccgcccatctctctcttctcctcgctgcagccacggatcttggtggcagggacgccatcgcatttcccagaatccaagcggcccggaagagcacgcgagtgccgccggccgcccttcgccaggtcttcacctgcgacgagcatccaccagttgatcttctggctggaaaatcaagttgacggtggcgagtaggggttctaccgtcggcagcctcatctcaaggagcaaaattctttcatgatccctttaaaccggagggcaagcctgcccagggctgggatggagtactttgatgcaaggcggaagcctcataatgttgggaaaatcattgcagccctggtcctcacaacagtctgtatatttgttctgaagcaatctcctggttttggtggcaatagcgtgttttctcgccatgaacctggggttacccatgtcttagttacaggaggagctggttatattggttcacatgccgctttaaggctcttaaaggataattatcgagttaccattgtggataatctatctagaggaaacatgggagcagtaaaggttctgcagggcttatttccgcagcctgggagactacaattcatctttgctgatcttggggaccagaaatctgtcaacaagatatttgctgaaaatgcatttgatgctgtgatgcactttgcagctgttgcttatgtgggagagagcacattggaaccccttaggtactatcacaatattacatcgaacactttattgattttggaggctatggcatctcatggagtcaaaaccctcatctactctagtacatgtgctacctatggagaaccagagaagatgcctattacagaagccacacctcagttccctatcaatccatatggaaaagctaagaaaatggcagaggatatcatattagatttctcaaagtcgaagggagctgacatggctgtcatgattttaagatatttcaatgttattggctctgaccctgagggaagattaggtgaggctcctaggccagaactccgagagcatggtcggatatctggggcatgcttcgatgcagcattaggagtcattccaggattgaaggttaaaggaacagattatcccacagctgatggaacctgcataagagattatattgatgtcacagatttagttgatgctcatgtgaaagcactcaacaaggcagagcctagaaaagtcggcatttacaatgttggaacaggaagaggtcgctcggttaatgagtttgttgatgcctgcaagaaagcaactggggttaacatcaaaattgaatacctcagcagaaggccaggagattatgcagaagtatacagcgatccaacaaagatcaacaaggagctcaactggacagctcaatataccgatctcaaagagagcctgtcagtcgcatggaggtggcaaaagtcgcatccgcacggctacgggccaaactaaatatagcctcactgaatcgtcaatacatattaattctttagttagcgatataagatcttggtgcgctactctcaaaaaaacactcctttattcttctctctttctttttatttcaaaggtttgttgttttttggctagcagaaacatgaacggtgatttggataaaagaaaaggggacctgtgacgacaatttcattgtttctgacaaaaaatgttgataaaaaaaatgtacatttcttcagccaatgagctgcaaggtttgattgaattg

SEQ ID NO: 1954 - DNA, 1786 bp, Panicum virgatum
tcttctctctctctctctctctctctctctctctctctctctctctgcttgcggcgacgactgggagagcgccgccgcccttcgccgggtcgtcgcccggcggcgagcaccaccagttgatcttctggctggaaaatcgcgttgacggtggcggagtaggtgttctaccatcggcagcttcatctcaaggagcagaattcttacatgatccctttaaaccggagggcaagcctgcctagggctgggatggagtacttcgatgcaaggcggaagcctcataatgttgggaaaatcattgcagccctggtcctcacagctctctgtatatttgttctgaagcaatctcctagttttggtggcaatagtgtgttttctcgccatgaacctggtgttacccacgtcttagtaacaggaggagctggttatattggatcacatgcctctttaaggctcttaaaggataactatcgagttaccattgtggataatctctctagaggaaacatgggagcagtaaaggctctgcagaagttatttccgcagcctgggaggctacaattcatctttgctgatctgggggaccagaaatctgtcaacaagatatttgctgaaaatgcatttgatgctgtgatgcattttgcagctgttgcttacgtgggtgagagcacactggaaccccttaggtactatcacaatattacatcaaacaccttactgattttggaggctatggcatcccatggagtcaagacccttatctattccagtacatgtgctacctatggagaaccagagaagatgcctattacagaagccacgcctcagttccctatcaatccatatggaaaagctaagaaaatggcagaggatatcatattagatttctcaaagtcgaagggagctgatatggctgtcatgattttaagatatttcaatgttattggatctgaccctgagggaagattaggtgaagctcccaggccagaactacgagagcatggtcggatatctggggcatgctttgatgcagcattaggagtcattccaggattaaaggttaaaggaacagattatcctacagctgatggaacctgcataagagactacattgatgtcacagatctagttgacgctcatgtgaaagcactcaacaaggcagaacctagaaaagttggcatttataatgttggaaccggaagaggccgctcggttagagagtttgtggatgcctgcaagaaggcaactggggttgacatcaaagttgagtacctcaacagaaggccaggagactatgcagaagtatacagcgacccaacaaagatcaacaaggagctcaactggacggctcaatacacggacctcaaggagagcctgtcagtcgcatggaggtggcaaaagtcacatccacacggctatgggacaaactaaatatagcctgctgatcaataatttcactgaatcgtcgatacatattgattctttagttagtggtataagatcttctcaaaatcactcattgttgtattcttctcaccctctttcttttcttttcttttttcaaaggttggttttttggctagcaaagacaaacaatgatttgggtatgctgtaaatcctggatgcattcctgtaagagcaaactacattgtttctgacatgaagtgttgattaaaaaaatgtacatttattcagccagtccaagctgcaaagctatttgactgaattgagttacgaaaaacctgaagtgttgtgattgctagatatgtgctctgtggtttttgtgctg

SEQ ID NO: 1955 - DNA, 1970 bp, Panax ginseng
tccgcaattacacacctttctctattcaattcaaaacgtaaacacgcagaagagcagagtagagagggacctggtccaatacacccagtcatctctttaataatctgcttcgtgggttttactcaaaatatagtcttcgattctccgatcaatacactgtattgaactcgtcgtcttcattttttattcgaagccaactttgcgtgcccctttgcttttcatagatcttgcagagcatttatatgagcgttatatatagcagatttcatcaaatttgcagccaacaagggattttattgatcattgatctgaaagagtgattttgttacctactttgtttagcatttattctgcaaatgctaaatttaaatagatcaagaactcagacaaggactaatcgatctatgtctttaggagtcatggactatgttgatccgaagaagaagagcaattttataggaaagattcttttggctgccgtcttaacagcattatgcattcttgtgcttaaacaatctccaagtttcaactctccaagcgcattctctcgtcatgaagcagggattacacatgttctagtaacaggaggtgctggctatattggttctcatgctgcactacggcttttgaaagatttataccgtgtaactatagtggacaatctctctcggggaaacctaggtgccatcaaagttctacaaaacctatttccagaacctgggagacttcaatttatatatgccgacttgggagatgctaaggctgtgaacaaaatattttcagaaaatgcttttgatgctgtgatacattttgcggctgtagcatatgttggcgagagcacccttgatcctcttaagtattatcataatattacatcaaataccctggtggtgttggaggctatggcagcacatggcgtgacaactctgatatattcaagtacgtgtgcaacctatggggagcctgaaaagatgccaatcacagaagaaactcctcagcttccaattaatccatatggaaaagccaagaaaatggcagaagatatcatcttggatttccataagaactcgaacatggctgtcatgatcttaagatacttcaatgtaattggatctgatccagagggaagacttggagaagctcccagaccagaactacgtgagcatggacggatatcaggtgcttgctttgatgcagctcgtggtattattcctggacttaaggttagaggaacagattataaaactgcagatggcacttgcatacgggactacattgatgttactgatctggttgatgctcacgtgaaagcccttgaaaaggcagaacctcgaaaagttggaatctataatgttggaactggaagaggtagatcagtaaaggagtttgtcgaggcttgtaagaaggcaaccgaagtatctataaaagttgacttccttgcccgtcggcctggtgactatgctgaagtgttagctgatcccacaaagatcttccgtgagctaaactggaccgcgcgatacactgatcttcaagaaagtttgcaggtggcatggagatggcaaaaatcgcatcataacggttacggcccggcaggtggcaaggagatggcaaaaatcacatcgtaaaggttacggcccggctagtttggtaaacatcttcataatacagtttagtggaatactaggttgaccccccaatgcagagcctgattttgcctcaattctattactaatctcttagaataagggttttgaagggtaggggttttgatatagttctcacataatatctaattatctattaacttattaatattattgtaattatacgggttagagggttttaggagacttaccatatttaattctgacaggtaattagtttaataataataccattcaggtatagctttacaattgcctcaactttctttcttttttatgactttatgtgggagcagactgcctgcc

SEQ ID NO: 1956 - DNA, 1666 bp, Tripterygium wilfordii
atcaagacctggtcgtcccttgccctctcatacacaattctcttaaatttccatctcccctttctctctcttacgttttcgatcatcgtgggttctactcaagattaatttcgtattttctaccgacaccataaacaagaagatatcttctttgatcactgctacaaggcataggatctgatttgaatacagactacttattaagaagggatttcccaaatgttaaattttggcagggccagaactcaagcaaggggtactagaaatatgcctttctctggcatggattatgcagacccgaaaaggaagggtaattttgtagggaaggtccttttggctgctgctttgacagccttatgcattattgtgctgaagcaatccccaacctttaatagccctagcccgttttctatccgtgaaactggtgtaactcatgtcctagtgacgggcggtgctggctatattggttcacatgctgctttacggcttcttaaggaatcatatcgtgtaaccatagtggacaacctttcgaggggaaatataggtgccatcagggttctacaagaattatttccagaacctgggaggctccagtttatatgtgctgacctgggggatgcaaaagctgttaacaaaatattctcagaaaacgcatttgatgctgtgatgcattttgcagcagttgcttatgttggcgaaagtacgcttgatcctcttaagtattatcacaatattacatcaaataccctggtagtgctagaatcaatggctgctcatggtgtgaagactctgatttattccagtacatgtgcaacatatggcgagcctgagaagatgcccattactgaagaaactccgcagaacccaatcaatccctatgggaaagctaagaagatggcagaagatatcatcctggatttttctaagaattcagacatggcagttatgattttaagatatttcaatgtaattggatcagatccagagggcagactaggagaagctccgagacctgaacttcgtgagcatggtcgaatttctggtgcttgttttgatgccgctcgtggtattatgaatgggttgaaggttaaaggaacggactataaaacccctgacggcacttgtgtccgggactatatagatgttactgatctggttgatgctcacgtgaaagctctccagaaggcggtgcctagcaaagtcggaatctacaatgttggtactggaaaaggtagatcagtaaaggagtttgtggaggcatgtaagaaggcaactggagtagatatcaaagttgattacttgccccgacggcctggtgactatgctgaagtatacagtgacccgactaagatcttgcgtgagttgaactggacagcgcagtacactgatcttcagaagagtttgcaggtcgcatggagatggcaaaagtcccaccgcgacgggtatggatcctctcaagtgatgtcttcctgagaagtttagtcactacagaaattcaatgcaagcccctcggcagcacagagaatgttgtacttctatctctactgaagaggggtttcgaaccgaggttagttttttgaacccttctttacgagtaagggttagttgtaggaagtggccaattcattatatgtaattgatagattatagcttaataatatatatt

SEQ ID NO: 1957 - DNA, 3418 bp, Cicer arietinum
catttttaagttcttaataagtgttataagttaaaatttcctttagttaaagcaaattctacagtggattagatccacatgatcattaatcaatatttaaaaattatcaaataaaaaatgctttttatcaatataaattaactattttttattttacttttacatcgttgtttcattaataaattatacaacaatttaaaaaatatcttaatttttaagtgtccgtgccacctagcattcctattgagattgggcagtcctaacattcacccacacagatatcaatgaagaattaaccgccgtttggttctgttacgacgggttgaattccctccataatgatccaaggatgaagggtttcgcggtagaacctggcccacaaccaaccaaccgtcgcagtccacgtcatcaaggctgaaactatagcaaaacgcctaggagtggaccccacagaaaaagaagcgtgtcgggtgcttgacgttacggaaagacagtccctgcaaacggcgtctctttttttacttttgcccacaatcaaatcatcaccaccactacacacacaacacagaagagagaaacaaacaaacaaacaaagaaaaagagaatgtgagtgagtggaagaagaacgttgcaagttaagctaatcctcactcataccgcgctttatcacgttcacttactttatcctttctttcgtttttctatctttgccgttaccaaattattactcactgtaaccaccgtaaatattgcattgtagaactcaaatgtctgtagccaaatgagatccgtctgaaatttctgttcaataacaatggggagtgtttcctccgaagaagtttctgaccgatgcggtagttacagtcccagtgctgacatcagcgaatcggagagttgcagcagtttctatgttcgccgtttcgatgccgagggagcatccagttctgctaatctctctccccgtccgctcgccgcacatttcaacctaccgccggcggcgcaggttatgcttccggtcatcggaggaaaagacgtcgtcgtttgggatcacaagcgtgacctggatttgtccgaagtggaaatgatgaaggaacgtttcgctaagctgcttttaggggaagatatgtctggtggtggaaagggggtttgcactgcgcttgcaatctccaacgcaatcacgaatctctctgcaactgtgtttggcgagttatggaggttggaaccactggcaccacagaaaaaatcaatgtggcgtagggaaatggaatggctactatgtgtgagtgattcaattgtggagctggtgccttctgtgcagcagtttccaggtggtggaacctatgaagtgatggccacacatcctcgttccgatttgtacatcaatcttcctgctttgaagaagcttgatggaatgttgcttggtatgctagatggtttttgtgacacgcagttttggtatgttgatagaggaattgtattgggtgattctaaggattgtgatgagtatggtagaccttctgttaggcaagaagagaaatggtggcttccttctcccaagcttccaccaaatgggttgtgtgaggatgataggaaaaggttgcagcagtgtagggattgtactaaccagatactcaaggctgccatggcaattaatagttctgttcttgctgaaatggaaattcctgtcgtctatatagaatccttgcccaggactggtaaagcttgtctaggcgatataatctaccggtacataactgctgatcagttctcgtctgaatgtctccttgattgtctggatctatcatctgagcaccacacactggatatagctaatagaattgaggctgctatacatgtatggaggttgaaagaccataagaaacataaaaattcagttaaagccaggcggtcttggggtggaaaggtaaagagccttgttgctgatggtgagaagaaccattttcttgcacaacgggcagagacactactgcaaagcttgcaacaccgatttcctgggctccctcaaacagcacttgatatggccaagatacaatataatagggatgtaggacagtctattcttgaaagttattcgagggtgatggagagtttggcctttaacataatggccaggatagatgatgtgctttatgtagacgatactataaaacaatgtgcagctgcagattccatcttgttcagcagaggaggtttcagtggtctgcccatccagaagcgaatgtctcccagccccttctcaattcaacgcacgccatatgcctctccttttgcaaccccaacgttctgttcctcctctcctcttagtggaagtccttgtagtccacgtaggacacacactgttaagaggaatgccaagggaaaagattcgaagactgaaaagttgccttcatctgattttgagaaggtatggtcatacacaggaagcctcagtgtaagaagagtatctggcgaggctccagaaagaaactgagttctagagttagtatctcagtatgaacattaatttgaatccagagcaggtcatcaatcatctatggtggtcttctagaagcggatcaggttaaagcctttggtactgttcctgtatattctttaggcagtatgagtaggattatgatgaaaaatgatgcccttggatcatcagttaaaaatgtttgctgtcaagtataattttttgaagccgcccacaagatggtttttctataaatgcaaaatgctaggtagagttcgggactatacacccgatttaagattcagcattagccatgtgctattgtctccttttactgccctattcaatgcctggcctaaacagctatgcctccgaattgcaagtctcaaaatttactattttatttctaaaaatatatattatggcaatattaaaatagctgttagtaatcaagaagtctccaacaatagcaatggtgaacatgtcaacataacgattggcaaagatggctaaaagcgtcttcatctatcattagctattaaataacttcacaagtaggggtaataattggatgcataacattgtttgagtaataagaagctagcaagtacattatgcgcatgcttgtattggcgagtttggcaaaattacaataagcataagccactgtgattttgtaatagttgcacattagagcttcaacaaaactatggttctgaattactgtacctcaagtgtgtaaagaaagaaaaaacttggttttgtcatgctaaatactatcacttattattagtagttatgttgggatctaaggaaaacacgtagcatgaaaatgcttcgatgtataacaggttgaacttgaaattttctattgtttggatagtcatgattttggagtggaagagtaaaaaccctacttgttttaaccatttatagaaataaaat

SEQ ID NO: 1958 - DNA, 2243 bp, Medicago truncatula
cacacctcaacaacaacactgacagagtaaaataaagaatttaacaaatacttataacaaagacaaagaaaaagaataaatgggaagtgtttcgtcggaagatgtttcagagcgatgtggaagttacagtccgagtgctgacatcagcgaatcggaaagttctagcagcttctacggccgacgtttcgacgcggaaggagcttccagctcggcaaatctctcgccacgtcagctcgccgctcatttcaacttgccggcgacggcgcaggttatgcttccggtcatcggtgggaaagatgttgctgtttgggatcacaaacgtgacttggatttgaccgaagttgaaatgatgaaggaacgttttgcaaagttgcttttaggagaagatatgtccggtggtggaaaaggggtttgcactgcacttgcaatctctaatgccatcacaaatctctccgcgactgtgtttggtgaattatggaggttggagccactagcaccacagaaaaaagcaatgtggcgaagggaaatggaatggctactttgcgtgagtgattcaatagtcgagttggtgccttctgtgcagcaatttccaggtggtggaacctatgaagtgatggcgacgcggcctcgctctgatttgtacatcaatcttcctgctttgaagaagcttgatggaatgttgcttagtatgttggatggattttgtgatactcagttttggtatgttgatagagggattgtgttgggtgattctaaggattgtgatgattatggtagaccttctgttaggcaagaagagaaatggtggcttccttctcctaagcttccgccgaatgggttatgtgaggatgataggaaaaggttgcagcagtgtagggattgtacgaaccagatacttaaggctgccatggcgattaatagttctgttctcgctgaaatggaaattcctgctgcttatgtagaatccttgccaaggaatggcaaagcttgtcttggggatataatataccggtacataactgctggtcagttttcctctgaatgtcttctggattgcttggatttatcatctgagcaccacacacaagatatagctaatagaattgaggctgctatacatgtatggaggttgaaagactataagaaacttaaaaaatcggggaaagccagacggtcttggggtggaaaggtaaagagccttgtcgctgatggtgagaagaaccactttcttgtccaacgggcagagacactactgcaaagcttgaaacgccgatttcccgggcttcctcaaacagcgctagacatggccaagatacagtataataaggatgtagggcagtctattcttgagagttattccagggtgatggagagcttggcctttaacataatggccaggatcgatgatgtcctttatgtagacgatactgtaaaacgaagtgcagctgcagattctatcttgttcggcaggggaggttttggtggtctgcctattcaaaagcgaatgactcccagccccttctcaattcaacataccccatacgcctctccttttgctaccccatcattctgttcctcctctcctgttagtgggagtccttgcagtccacgcaggacacatgatgtaaagaggaacgctaagggtaaagattccaaggccggaaagttggcttcgactgattatgagaaggtatggtcatacgcgggaaacctcagcgcaagaagaaattctggtgaggctccagaaagagactgagttctagatttagcatgtgtttggaacggtgtcccgttttgcaaacttgcggcaataacccatgttaatgtgaaagctttatttactagcttctctatttccacgtctggaacacattgagaagcacgtttgggtgggagaccgccaaaccaaacagacacttagtatcatctatgataaatgatctattaacttgaatctagagggggttgttcatctttggttatctagtctttttgtaccattccttgtatatgagggtataatttttgtatattcgtaggcaatatgagtaggtttatgaagaaaaattatgcccttggatcatcaattaaaaatgtctcctttcaagtataaatttttggaggccacccacatgatgtttttctataaatgcaaattgctgtagagttttgaactatacacccaatttaagattcagcattagccatgtgccattatgtccttactgccatattcattgacg

SEQ ID NO: 1959 - DNA, 2111 bp, Trifolium pratense
aaaatgcgtgttaccaaattaagatctgtgtgaaatatttgtgtttgtgaaagaaacaatgggaagtgtttcgtcggaagaagaagtttcggagcgttgtggaagttatagtctgagtgctgacatcagcgaatcggagagttgtagtagtttttgcggtcgtcgttttgatgccgaaggagcttcaagttccgctaatctctcgccacgtcagctcgccgctcattttaacctaccgacggcggcgcaggtcatgcttccggttatcggtggtaaagatgttgccgtttgggatcataaacgtgatctggatttgtccgaagttgaaatgatgaaggaacggttcgctaagctgcttttaggggaagacatgtctggcggtggaaagggggtttgcactgcgcttgcaatttctaacgcaatcacgaatctctccgcgacagtgtttggcgagttatggaggttagagccactagcgccacagaaaaaagcaatgtggcgaagagaaatggactggctactatgtgtgagtgattcgattgtcgagttggttccttctgtgcagcagtttccaggtggtgggacctatgaagtgatggcaacacggcctcgttctgatttgcacatcaaccttcctgctttgaagaagcttgatggaatgctgctaagtatgctggatggattttgtgatacacagttttggtatgttgatagaggaattgtgttgggtgattctaaggattgtgatgagtgtgatagaccttctgttaggcaagaagagaaatggtggcttccttctcccaagcttccgccaaatgggttgtgtgaggatgataggaaaaggttgcagcagtgtagggattgcactaaccagatactaaaggctgccatggcaattaatagttctgttcttgctgaaatggaaattcctgctgcctatgttgaatccttgcccaggaatggtaaggcttgtctaggagatataatatatcggtacataactgctacccagttctcgtctgaatgtctcctagattgcctggatctatcatctgagcaccacacacaggatatagctaatagaattgaagctgctatacatgtatggagattgaaagacaataagaaagttaaaaattcggtgaaagcccgaaggtcttggggtggaaaagtaaaaaaccttgttgctgacggtgataagaaccattttcttgcccaacgggcagagacactactgcaaaacttgaaacatcgatttcctgggctccctcaaacagcactagatatggccaagatacaatataataaggatgtagggcagtctattcttgaaagttattccagggtgatggagagcttggcttttaacataatggccaggatcgatgacgtcctttatgtagacgatgctattaaacgatgtgcagctgcagattctatcttgtttggtaggggaggctttggtggtcggcctattcagaagcgaatgtctcccagtcccttctcaattcaacacaccccatatgcctctccttttggaaccgcatcctcctctcctgctagcgggagctcttgcagtccaagtagaacacatgctgtcaagaggaattccaagggaaaagattcaaagacgggaaagttttccccagctgattttgagaaagtatggtcatacacgggaaacctcaatgtaagaagagtttctggcgaggctccggaaagaaactgaattctagttcgaatgatctattaacttagatccatagtgggtcattagtcatctttcgattgtcttctaaaagcacagatcaggctaaagcctttggtacaattctctgtatatgagggtataatttttgtatattcgtaggcaagtatgagtaggtttatgaagaaaaattatgcccttggatcatcaattaaaaatgtctcctctcaagtataaatttctggaggctacccacaagttggtttttctataaaaccaaactctaggtagaatccttgcccacaagattgcattagccatgtgccattgtctttccttacttccatattcaatgatgcctaaacagctatgccttccgatcgtaggtctcaaaatttactat

SEQ ID NO: 1960 - DNA, 1052 bp, Cajanus cajan
tttgtgtggtggtaccaatggtcacgccacgagagaggtccataaaatgtgtggatagaaaccacagtttctctgtagccattgaattccacgttttatctatcctttgctcactagcgttgagaaactcgcgccatggctgctaccatgacatggaaactctcactgcttctgagccttctctcagtttcatcacttgagaatgttggggcagttcccccaacgtgcaagcgcatagagtgtcccagctatgacgtcatacaagttggcaatggctacgaaatccgccgctataattcacccgtttggatttccaacactcccattcaagacatttctctcgttgaagccactagaaccggctttttgaggctatttgattacattcaaggtaagaacaactacaagcagaaaattgagatgacagggccggtgatctctgaagttttacccagtgatggacccttctgtgagtcctcatttgttgtgagcttctatgtgccaaaagagaaccaagcaaacccgccacctgcaaagggccttcaggttcagagatggaaaactgtgtatgcagcagttagacagtttggtggatttgtcaaagatactgatgttggagaggaagctgcagccttgaaggctagtattgctggcactaagtggggtgctgcagttgagaaaagcaagagtgctgggcatgcttctgtttacactgtcgcacagtacaacgccccttttgaatatgataacagggtgaatgagatatggttcttgtttgatattgaaagtggacttcaaaccatgtgaaaacatatgtatataccagacaaggtagcatattagcatctaagctttaaacatgaaagcaatatgcagactgcggactgaggtttctggacatgttgaatggatgaataaagtgtttaacatttagctaaaacaatgttttcttattgacttgcttttaggttcatcatagttatatactgtctgtttaggaaaattcatcttgaaacacttctagaagagcaaaatgaaaaaaaaatgtgaaa

SEQ ID NO: 1961 - DNA, 888 bp, Vigna unguiculata
aaaaatatgtccatttatattagccatagaatttcacattttatcctttgctcattagcgttctgcaacttgcgccatggctgctgctgctactaccatcgcatgcaaggtttcagtgcttttgagcctcttctcagtttggtttgtgtgtgtaagttccgattctcttccgaatgtaggggcacttcccccaacatgccagcgcatagaatgtcccagctatgatctcattcaagtcggaaatggctacgaaatccgccgctacaattcacccgtttggatttccaacgcccccattcaagacatttctcttgttgaagccacaagaaccgccttcttcaggctatttgattatattcagggaaagaacaactacaagcagaaaattgagatgacagcacctgtgatctctgaagtatcacccagtgatggacctttctgtgagtcctcatttgttgtgagcttctatgtgccgaaagagaaccaagcaaacccgcccactgcaaagggccttcaggttcaaagatggaagactgtgtatgtagcagttagacagtttggtggatttgtgaaagattatgatgttggggagcaagctgcagccttgaaggctagtattgctggaaccaagtggggtgctgcagttgagaagagcaagagtgctgctcatacctctgtttacactgttgcacagtacaatgccccttttgaatatgataatagagtgaatgagatatggttcttgtttgacattgaagatggacaacaaaccatgtgaaaatgtataccagacatcagctttcaacatgaaagcaatatgcagagtgcagactgttgtgtgaggagacctttaatggatgaataaagtgtttcacatttagctaaaaa

SEQ ID NO: 1962 - DNA, 1262 bp, Panicum virgatum
atggccattcccacccctaaccacacaaggctcagcgctagcgttcctcgcgcccgcgccgccccgatcggagacaaggaagcatggacgcggccgtctcgaatccgtcgtcgatcaagaggatcgcgctggtcaccggggggaacaaggggatcgggctggagacgtgccggcagctggcgaccagggggctcaaggtcgtcctgacggcgaggaacgaggcgagggggctggaggcggtcgaggccatcaggcgctccagcggcgccgccgccgccgccgaggttttcttccaccagctggacgtcaccgacccctccagcgccgcccggctggcggatttcgtcaggggccagttcgggaggcttgacatcctgatcaataatgctgggatttcaggtgttgaccgagatccaattttgtttgccaaagtcaaggatcaggttgaaggcatggatgtgaaccagagagttgagtggatgacagaaaattcaaaagagacatacgaggaagctaaacaatgtatgaggacgaactactatggtgccaagattgtcacggaggcactacttccccttcttcagttatcctcttccggaaggattgtcaatgtttcgtcaggctttgggctgctgagaaacttcaacagtgaagaacttaggaaggagtttgatgacattgacaatcttactgaaaagagactggaagaactgttggatttgttcctagaagattttaaggccaacttattagaggcacatgggtggccaacaggtggatcttcagcctacaaagttgccaaagcagcccttaatgcatacacaaggattcttgctaagaagtatcctacactgcgtatcaactgtctgacacctggttatgtcaagaccgatatttgtatgcacatgggagtattgacacttgaagagggtgctcgcaaccctgtaaaagtcgctctcttgcctgacgatggcccaaccggtgcttattttgatctgaatggggaggcgccctttgtgtgatcatattatttgatcacgtttcccttactcagttttagaataatagaaaaggatatagagttgttggtgctgataaatattgtagtttgacttgtgtactcaaactatatgattcatcgtcttctatatgatctctctggagacgttttcacatttgcaattgaccactgatctcactggagaagttgcatattttcaatggaccactcttggcatgtttggtcgcaccaattctttaca

SEQ ID NO: 1963 - DNA, 2035 bp, Hordeum vulgare
ggtgaagtaatttagacaaatgtcatatgcattagtagttactttcctatgacagcacaaaagaaaagcaaagcaccaacaaaacaagaatcccaccattgttcacttcgcaggcattttgtcgaacacagctcgagcgtcaggcatgccaaactccgccttccctcgcctcgctttctccgccctcgcctcaaatacccacagcaaaccaaaccccgctaccctcccacctcgccccccaccctccagctctgcaatggcggcatcctcggcccccctctccttctccgcctccgcctcctccctgcccgcgcgcctgcgcctcgcggcgccggcggcgtcgtgcgcggccacgacgcggcggcgccggccgatggtggtccgcgccaagatccgggagatcttcatgccggcgctcagctccacgatgacggagggcaagatcgtgtcctgggccgccgcggagggcgaccgcgtcaccaagggcgacgccgtcgtggtcgtcgagtccgacaaggccgacatggacgtcgagacgttctacgacggcatcgtcgccgccgtcctcgtccccgcgggcgagtccgcccccgtcggcgcccccatcgctctgctcgccgagtctgaggaggacgtggcgcttgccgtcgcccaggcccaggcgctctccagcggacagggacagccccagcagcaggcccctgctctttccgatgccgccgattcgcctcccccgccggcggcggctccggtggctgctgctcccgcggctgtggccgcggggaccaagggcgttgccacgccgcaggctaagaagctggccaagcagcatagggtggatcttgccaacgtgactggcaccgggcaattcggccgaattacgcctgctgatgttgaggcattcgctggcatccagccaaaaccaaaggtggctcctgctcctgctgctgcgcctgtggctgcagcttcgtcggtaagggccgtgccgcaggcggcggtgcttccgccggtgcctggtgccacggtggttccgttcactgcaatgcaggctgcagtgagcaagaacatggtggagagcctgtcggtgccagcattccgtgttggttaccccattctcactgataagcttgacgagctgtatgagaaggtcaagccaaagggggtaacgatgactgtgttgcttgcgaaagccgctgctatggcgcttgcacaacaccctgtggtgaacgctagctgcagggatgggacgagcttcacttacaacagttccatcaacattgctgtggctgtatctattgatggtggactcatcacacccgtcctggagcaagctgataaggcaagtacaagcgacctctgtctctgtgataaatgttgtctggatatatatttactctcacaaaagtggaaggaactagtcaagaaggcacgcgcaaagcaacttcaaccaaacgagtacaactctgggacatttacactgtccaacttgggcatgtttggtgtagatagatttgatgcaattcttccacctggccagggagctataatggctgttggagcctcaaaatctacagtggtggccgataaagatggtttctttagtgttcagaacaaaatgctggtcaacgtcacagctgatcaccggattgtgtatggtgctgatttggcagcattcctgcaaacttttgcgaaaattatcgaggaccctgagagcctgactttgtaggattttcttggaagtgattcaaccaccagttcatttccagttggaagtctgtcgctgagtttgtttttggttttcctttttgtatctttgagtactcaaggggatattgcttttcagctgttcgtactgttttcacttgggaatactggatactgttggaaattggttatgatgttatgaaattttggaaataaataaattatgtttgtagaataatttgcagatcatccttttgccttagttctttgtattctgctttcccttgttatgttttgcatgtgcttatttatttatttattacttgttgaa

SEQ ID NO: 1964 - DNA, 1608 bp, Brachypodium distachyon
cccgcgcgcactcccccttaattcctcccttccccttagccagccaaggccaagctagctggctcaggctggcctcatgttccaaaagtctcgtccccatgtgaccctccgattccaattcccttcccatcccatccatctccgtctcaaccaagaaggtgcaagtgtagtagctagctatccaagcactggagtagtataaaacaaggctctatgtgcgccggcgaattacgcaatttccgcgcaccggcccagatcgaggagtagccgctagctagctgtgcatgcgcattgccgcgcacgcatcggcatcggcatcggcatggcgcagctgccgcccaagatcccgatgccggcgcaccaccactggcccgggggcgtcgcggacgcgcaccaccaccaccaccaggtggcgtgggcggacgagttcgcggagttcgcggcggcgcggcggggcgcgcaccgccggtcgctgagcgactccgtggccttcgtggaggtgatggcgccggggggagccggcgacttcgaccggctggacgacgaccagctcatgtccatgttccccgacgagggccatggcggtggcgggtcgactacggcgccgggatccgagaacgggactagcagcgacagcgacggcgtcaaacaccgcaaggatcatcctcagtacgacgacgatgagcagcagaatgacaacgaggctaacccggaggaggagccggcgccggggcgggccacgccgacctcgtccacggagaccatccgcgaccccaagagagtcaagaggatactggcgaatcgtcagtcggcgcagaggtcgcgggtgaggaagctgcagtacatctccgagctggagcggtgcgtcacaacgctgcagaacgaggtgtccgtgctgtctcctcgggtggcattcctggatcagcagcggaccatcctgaccgtcggcaacagccacctcaagcagcggatcgcggcactcgcgcaggacaagattttcaaggacgctcatcaagaggcgctcaaggaggaaatcgagaggctccggcaagtgtaccagcaacagaacctcaggatgtcttccgctccggcctccgaccatgcccacggtgggccgcctcctgtgcgcgcagagaaggagctcatcagctagctcgtcgagatgagatcattgcctgtctgcccgccttatcattgacctggactgggagggaaacatggcagcacgcatgcttgcatggaactgcggatggtttcttcttttttgttcattgacttgtgcatcattctttgtatgtcggtattaatttttgtcctttctataccgtgggggtcgtggtgattggtgaagtcgtaaagagagaaactcgagtgttcgtcgtttgtaaatttcgctgtagctacattgccacttctgtatgtagattgtttcgaaagctagatttctgaagaccattgttttaggggaagtttttcagagatcgtatcagtaccactctttgttttttcagaagactgagcttaattgatgaatacttgaatactgcataactgcaaggcaggcccccaagtgctgctttagcagaattggtgtctgcatttttctga

SEQ ID NO: 1965 - DNA, 3139 bp, Glycine max
cgaattctcgttcttctgccataatcaagcgaaaaccatttcgttgcggtcactccttcgaagaactcggtttcagatctgaaccgcaatcgtttgaagagatccacagtggctgcgttctccgttcacttctcccacctttcatgttcttctccgcgtgcgaacagatcttgaaaattggcgcctcaacgacgttcgcagcgccacgcgagtggccagatgccgcagggcaatgccgccgccgcagcagcgctgctggaccacggcggcgatgccggcgacgccgtaatggcgcggtggttgcagtccgctggcctgcagcatctagcctctcccctcgcttccaccgccatcgatcatcgcctcctccctaaccttctcatgcagggttatggagcacagtctactgaggagaagcagaggcttttaaagttaatgagaaacctcaattttaatggggaatctggttcggagccatatacacccaccactcaatctttaggtgtggctgggtcggatgggttttattctcctgagttcaggggggagtttggagctgggcttttggatcttcatgctatggatgatacagagcttttgtctgagcatgtagtttcagaaccttttgagccatcacccttcatgcctggagatactagagtatttgaagacgatttcgatccaattaacagcaagctggaaagcggggaagcagatactgatgcatcaatttccttacctatgaatagcacaagggaaaataatgttgctaagattaaagttgtggtacgcaaaaggcctttaaacaagaaggagcttgctaagaaggaggatgatgttgtaaccgtaactggcaatgcatatttgacagtccatgaaccgaaactaaaggttgatttgacagcttatgtggagaagcatgagttttgttttgatgctgtgcttgatgagcatgtgaccaatgatgaagtataccgaagcacagttgaaccaattattcctacaatatttgagcgaaccaaagctacctgtttcgcttatggtcagacaggaagtggcaaaacatacacaatgcaacctttaccactcagagctgcagaagaccttgttcgacagttgcatcagccagtttaccgggatcagagatttaaattgtggcttagctactttgagatatatggtggaaaactttatgatcttcttagtgacagaaagaaactttgcatgagggaagatggacggcagcaagtttgtattgtaggactgcaagaatttgaagtttgtgatgtactaattgtcaaagaattcattgaaaagggaagtgctgcaagaagtacaggatccactggtgctaatgaggagtcctccaggtcacatgctatcttgcaactggctgtaaagaagcacagtgaagttaaagcgagcaagcgaaacaatgatgggaatgaggcaagaagtgggaaggttgtgggaaaaatttcttttattgatcttgctggaagtgaacgaggtgctgacactactgataacgatcgtcagacacggattgaaggagcagaaatcaataagagccttttggctttgaaggagtgtattcgtgctttagacaatgaccagatccatattccatttcgaggaagcaaacttacagaagtgcttcgtgactcctttgtgggtaattcaaagactgttatgatctcttgtatatctccaggtgccgggtcatgtgaacacacacttaataccttgagatatgcagatcgggttaaaagtctatccaaaagtgggaatcctagaaaagaccaggtcccaaatgctgtaccacaaactaataataaggaggtttcatccacatcatcctttccagccagtgctggtgcagaggatttgaatgatcaacgtcaagagaaaacaatggatatgggcaggaaatttgttgaaaaggaaaattctttgcacagctctgcagcagctgctgttgacaaacagccattaagttattcttcaaattacctatcaaatgggggagaggaaaaaggctttccttcagcttcagtggacagggagaggtatgaagtgaagaactcacatggtgactctaccagtcaaaagatgaactcttattcacaaagtgatacggatgagaaagtgcaaaaggtgtctcccccgcgcagaaaaggctataaggatgaaaaatccgaaaggcctgctaactggatgaaaaaagatgccaacggttctgatctcttcactacaagctcaaagcagcagagcacagggaattatgggactgtgtctaaggatgaaaagtctgaaaggcctgcaaactggatgaaaagggatgccaatggttctgatcttgtcactacaagctccaagcagagcaccgggagttatagcactttgtctaaggatgaaaagtctgaaaggcctgcaaactggattaaaagggatgccaacggctctgataccttcactacaagctccaagcagcagagcaccgggaattataacaatatcaccactggatccaggcttaatgaaacagaatcctctcctgatgggaatgtcagtgcagtacttgaggaggaagaagcgctaattgctgctcataggaaagaaattgaagatacaatggagattgttcgtgaagaaatgaaactcttggcagaggtggaccaaccgggaagccttattgacaactatgtaaccaaattgagctttgtgctttctcgcaaagcagctagtctcgtgggtcttcaagctcgtcttgcaagattccaacatcgactaaaagagcaagaaattctaagtagaaaaagagttccccgtcaataagagactcggtttctcttattcaacgtcatctgtattctcgtgtttattagcaatatagttgaaaggttttgtttgatataaacaaatcttttgttgaatatattctaattgaatttacttacatgtatatgcccttgtgtgagtcgtgtgacttttgggccacctcttgcctttgcaaatttggtgttatctatgtaggttatctgcttcgttgtcataaaaaaaaaaaaaagttgtctgccccaaaatttttagtttgtgggcaaagtaataaataaaatagaatttaatgctgatactt

SEQ ID NO: 1966 - DNA, 2984 bp, Glycine max
ctctcttcttggtgtcgcgcactctcgttcttctgccataatcaatcaaaaaccatttcgttgcggtcactccttcgaagaactcggtttcagatctgaatcgcaatcgtttgggagatccacagtggctgcattctccgttcaattctcgcacctttcatgctcttctccacgtgcgaacagatcttgaaaattggcgcctcaacgacgttcgcagcgccacgcgagtggccagatgccgcagggcaatgccgccgccgcagctgcgctgctggaccacggcggcgatgctggcgacgccgtcatggcgcggtggctgcagtccgccggcctgcagcatctcgcctctcccctcgcttccaccgccatcgatcatcgactcctccccaaccttctcatgcagggctatggagcacagtctgctgaggagaagcagaggcttttaaagttaatgagaaacctcaattttaacggggaatctggttcggagccatatacgcctaccgctcaatctttaggtggagtggctgggtcggatgggttttattctcctgagttcaggggggattttggagctgggcttttggatcttcatgctatggatgatacagagcttttgtctgagcatgtagtttcagaaccatttgagccatcacccttcatgcgtggggatactagagtatttgaagacgatttcgatccaattaacagcaagctggagagcggggaagcagatactgatgcatcaatttccttacctatgaatagcacaagggaaaataatgttgctaagattaaagttgtggtacgcaaaagacctttaaacaagaaggagcttgctaagaaggaggatgatgttgtaactgtagctgacaatgcatatttgacagtccatgaaccgaaactaaaggttgatttgacagcttatgtggagaagcatgagttttgttttgatgctgtgcttgatgagcatgttaccaatgatgaagtataccgaagtacagttgaaccaattattcctacaatatttgagcgaaccaaagctacctgttttgcttatggtcagacaggaagtggcaaaacatacacaatgcaacctttaccactcagagctgcagaagaccttgttcgacagttgcatcagccagtttaccggaatcagagatttaaattgtggcttagctactttgagatttatggtggaaaactttatgatcttcttagtgacagaaagaaactttgcatgagagaagatggacggcagcaagtttgtattgtaggactgcaagaatttgaagtttgtgatgtacaaattgtcaaagaattcattgaaaagggaagtgctgcaagaagtacaggatccactggtgctaatgaggagtcctccaggtcacatgctatcttgcaactggctgtaaagaagcacagtgaagtgaaagcgagcaagcgaaacaatgatgggaatgaggcaagaagtgggaaggttgtggggaaaatttcttttattgatcttgctggaagtgaacgaggtgctgacactactgataatgatcgtcagacacggattgaaggagcggaaattaataagagccttttggccttgaaggagtgcattcgtgctttagacaatgaccagatccatattccatttcggggaagcaaacttacagaagtgcttcgtgactcctttgtgggtaattcgaagactgttatgatctcttgtatatctccaggtgctgggtcatgtgaacacacacttaataccttgagatacgcagatcgggttaaaagtctatccaaaagtgggaatcctaggaaagaccaggtccctaatgctgtaccacaaactaataataaggacgtttcatccacatcatcctttccagccagttctggggcagaggattttaatgatcaacgtcaagagaaaacaatggatatgggcaggaaatttgtcgaaaaggaaaattctttgcacagctctgcagctgcttctgttgacaaacagccagtaagttattcttcgaattacctatcaaatgggcgagatgaaaaaggctttccttcagcttcagtggacagggagaggtttgaagtgaagaactcacatggtgactctaccagtcaaaagatgaactcttattcacaaagtgatacagatgagaaagtgcaaaaggtgtctcccccgcgcagaaaaggctataaggatgaaaaatccgaaaggtctgctaactggatgaaaaaagatgccaatgattctgatctcttcaccacaagctccaagcagcagagcacagggaattatagcactttgtctaaggatgaaaagtctgaaaggcctgcaaagtggatgaaaagggatgccactggtgctgatctcatcactacaagctccaagcaacagagcaccgggagttatagcactttatctaaggatgaaaagtctgaaaggcctgcaaactggatgaaaagggatgccaacggctctgatcccttcactacaagctccaagcagcagagcacagggaattataacaatatcaccactggatccaggattaatgaaacagaatcctctcctgatgggaatgtcagtgcagtacttgaggaggaggaagcactgatcgccgctcataggaaagaaattgaagatacaatggagattgttcgtgaagaaatgaaactcttggcagaagtggatcaaccgggaagccttattgacaactatgtaaccaaattgaactttgtgctctctcgcaaagcagcaagtctcgtgggtcttcaagctcgtcttgcaagattccaacatcggctaaaagagcaagaaattctaagtagaaaaagagttccccgtcaataagtgactcggtttctcttatctgtattctcgtgtttgttagcaatatagttgaaaggttttgtttgatatatataaacaaatcttttgttgaatataattctaattgaatttacttacatgtgta

SEQ ID NO: 1967 - DNA, 3040 bp, Cajanus cajan
cggatgaagttggagtaagttggaattttgtattgcttgtacgttatactactcttgaattttgagctgtcctgcattttgagggaggattatggtaaggttttcttttagttggaagcttgcattgagtgtagtgtgtgtcaaatttgctaaacgttgcttgttctgtttttctttgtgatggtagtttatgaggtgacttggatgactgtgacgttgttgtagggttatggagcgcagtctgctgaagagaagcagaggcttttaaagttaatgagaaacctcaattttaatggggaatctggttcagagccatatacacccactgcgtcagatgggttttattctccggagtttaggggggattttggggccgggcttttggatcttcatgctatggatgatacggagcttttgtctgagtgtaagcatttgtgcttgcatgtgtttaattgctttaatttcccccccttgtatcagcatgtagtttcagaaccttttgagccatcgcccttcatgcctggagatactagagtatttgaagaggatttcaatcctattaacagcaagctggaaagtggggaagcagatgttgatgcatcaatttctttacctatgaatgaaaaagagtatagcacgagggaaaataatgttgccaagattagagttgtggtacggaaaagacctttaaacaagaaggagcttgctaaaaaggaagatgatattgtaactgtatctgacagtgcgtatctgactgtccatgaacccaaactaaaggttgatttgacggcttatgtggacaagcatgagttttgttttgatgctgtgcttgatgagcacgttaccaataacgaagtataccgaagtaccgttgaaccaattattcctacaatttttgagcgaaccaaagctacctgttttgcttatggtcagacaggaagtgggaaaacatacacaatgcaacctttaccactcagagctgcagaagaccttgtacgacagttgcatcagccagtttaccggaatcaaagatttaaattgtggcttagctactttgagatatatggtggaaaactttatgatcttctcagtgacagaagaaactttgtatgagggaagatggacggcagcaagtttgcattgtaggactgcaagaatttgaagtttctgatgtacaaattgtcaaagaattcattgaaaagggaaatgctgcaagaagtacaggatccactggtgctaatgaggagtcctccagatcacatgctatcttacaactggttgtaaagaagcacagtgaagtaaaagagagcaagcggaacaatgatggaaacgaggcaagaagtgggaaggttgtgggaaaaatttcctttattgatcttgctggaagtgaacgaggtgctgacactactgataatgatcgtcagacacggattgaaggagcagaaatcaataaaagccttttggctttgaaggagtgcattcgtgctttagacaatgaccagatccatattccatttcggggaagcaaacttacagaagtgcttcgtgactcctttgtcggtaattcaaagactgttatgatctcttgtatatctccaggtgctgggtcttgtgaacacacgcttaataccttgagatatgcagatcgggttaaaagtctatccaaaagtgggaatcctaaaaaagaccaagtcccaaatcctgtaccacaaagtaataaggaggtttcatctacatcaacccttccagctagtgctggtgcagaggattttaatgatcaacgtcaagagaaaacaatggatatgggcaggaaatttcttgaaaaggaaaattctttgcaaagctctgctgctactgttgataaacagttatttggtttttcttcaaattacctattaaatgggcgagaggaaaaaggtttggtttctgctccaatggacagggagaggtttgaagtgaagaactcacacagtgactctaccagtcaaaagatgaactcttattcactaaatgatacagatgaaaaagtgcaaaaggtgtctcctccacgcagaaaagggtccaaggatgaaaagtctgaaaggcctgcaaactggatgaagcgggattctagtggttctgatctcttcactacaagctccaagcagcaaagcacggggaattatagcactgcgtctaaggatgaaaagtctgaaaggcctgcaaactggatgaagagggatgccagtggttctgatctcgtcactacaagctccaagcagcagagcacagggaattatagctctgtgtcgaaagatgaaaagtcggaaaggcctgcaaactggatgaaaagggacaccaatggctctgatctcttcactacaagctccaagcagcagagcacagggaattataacaatattacctctggatctaggctttatgaagcagaattcaatcctgataggaatatcagtgcagtacttgaggaggaagaagcactaattgctgctcataggaaagaaatcgaggatacgatggagattgttcgtgaagaaatgaaactgttagcagaagtggaccaaccgggaagccttattgacaactacgtaacccaactgagttttgtgctttctcgcaaagcagcaagtctggtgggtcttcaagctcgtctagcaagattccaacatcgactaaaagagcaggagattcttagtagaaaaagagttccccgtcagtaacggactcaacgttgaaaggttttgtttgatttaaaacaaatcttttgttgaatatattataattgaatttacttgcatgcatatggccttgtgtgacttttgggccaccgcatgcctttgcaaatttcgtgtaatctatgtagcttatctgcgtccttgttataaaaaaaaaataataaaaataagaaagttgtctgcccaaatttttagttggagggcaaagtaaaatatgaaatagaattttatgcggatacaaaaataatatattgtgttcattctcaatatatatatagttcatcaaagattaaaaaataaatgaa

SEQ ID NO: 1968 - DNA, 1441 bp, Panicum virgatum
cggaggcggaggcggaggcgctcgaggaggaggagggaagtggggagaggtgccctggaactggaagcgaagcagcaatgggggagtccagcggctcggcctccttttcggtggacgtcgagcggatctccttcggcggcaaggagcatcttgtgaggacgagatgtggttctgctgtaacagttgcggtgtatggagacgaggacaagcctgcgcttattacctacccggatgtaggtttgaactacttgtcctgtttccaaggattgttcttctgcccggaagctgcgtctttgctgctccacaatttctgcatctaccacatcaatcctcaggggcacgagctgggagcggctccaatcccatctgatgtgccggtgctatctgttgatgatcttgccgatcaggttgcagatgtgctcgatttcttcagtttaggatctgtgatgtgcctcggtgtcacggttggtgcctatgtcctcacactctttgcgacaaaatatcgggagagggtaataggactgatgctggtttcccctctgtgcaaagccccatcctggagcgaatggttgtataataaggtattgttaaatttgctctactattatgggactcgaggcctgttcaaggagtacttgcttcagcggtactttagcaagttgctcgatgagaagcagggtgaaaatatttggagatttctccaatcgataaatgagaggcatgacttaacagactcattgaggaaattgcaatgccgcacactaatttttgtgggagagaactcagaattccatgaggatgccatccatatgaccacaaagctggacaggagacactgcgcactagttgaggtgcaggattgtggctcccttgtaactgaggagcagccgtatgccatgctgatgccaatggagtacttccttatgggatatggactttacagaccgagaccgtatgagctgagcggcagtcctcgcagtccactgagcccatgttgcatatcgcctgagctgctatctcctgagagtatgggtgtgaagctgaagccaataaagactcgggtcaccatcaactaacaccaggaaacaagtctcaggagtcagaatgaaaatggactacctgtattacattacatctcagaaaactaaagatagccacaagctggttgctctaggacgagtggcggtcgcaccttgcttgtatactgtggcaaatggtttattttgaagataatatatataatgtacataaaaaagaaagagcagaggggaaccccgtagtagagataaccaggatgtttcattgttcaattagttttgtagtcagccgtcagcacaaatgtaaatctcaaaatagtttgacagaaacaataagaaaagaatcgtttcagatggttcttctttcatacagacaaaattgtcatatgttagacctctgcact

SEQ ID NO: 1969 - DNA, 2106 bp, Aegilops tauschii
cccgtcaaaacgagccaacaacgtgtggatctaaaaactagtctccggcttgtcccgttccagtcacccaccggtaagctcaccgccgtcggtggccagtttatttctgggcagcggccctctcgcgtatatatgcacgcaatagacgccaagggggaaggcagggagagagaaagagaggccctgaaccggaagcaaggaagaggcgagcgacgacgaggaggaggaggaggttgttggtgggctgttgagaggaagcttctggaagccgccatgggggactcgagcgggtcggtgtccatcgacgtggagcggatctacttcggcggcaaggagcatcctgtgagaacaagatacggccctgtatcggtctccgtgtacggcgacgaagacaagccagcgctcataacgtacccggatgtagctctaaattacatgtcctgcttccaaggattgttcttctgcccagaggctgcgtccctgttgcttcacaatttttgtatttaccatattactccgcaaggccatgagttgggagcagctccaattccatcggatgtacctgagctatctgttgataatctcgcggatcaggtcgcggatgttcttgatttcttcggtttagggtctgtgatgtgcatgggtgtcaccgccggtgcctacgtgcttaccctctttgcagcaaagtacagggaaagggttcttggcctgatgttggtttcacctctatgcaaagccccatcttggagtgagtggttgtataacaaggtattgttaaacttactttattattgtggcactagtggactagtgaacgaatgcttccttcagcggtattttagcacggaagttcgtggaagtggacaagaacctgaatcggaaattgtccaggcttgtagaagtttacttgatcagaggcagggtgttaatgtatgtcgattccttaaagcaatcaacgagagacatgacttgactgaagcactgaagaagctccggtgccggacgctgattttcgtgggagagaactcgcagttccatgccgacgctgtccacatgaccacaaaactagaccggagatactgcgctctagtcgaggttcaggcatgcgggtcgctcgtcaccgaggagcagccacacgcaatgctgatcccgatggagtacttcttgatgggatacgggatgtacagaccgtcccagctcgagagcagcccccggagcaccctgaacccgttctgcatatcgccggagctgctgtcgcccgagagcatgggggtgaagctgaagcccatcaagacccgggcctccctcattgtctaaacgacatgtggggggagatcttggatggcctgacgacacagctcgcaaaaaagcgaagactgcttggttgagctgatcggagcacggtcaccatcgcgagacaagttttgataccttccggtaccttggcacgcacgcattgcatagatcgagatcgatacgctaatggcagcatttgctgtagtgtattgctgtaagcctgtaatctacgtcttctgggataggcaagcaaggggaatagggttgaggttgtaggggaggaatacggctgtttgtttctttgttgatatgctttgtagtagtccacatcacatgtgtatatgtcatcatcagatcatttcacacgggaaagcaatatatatatggtaaagcagaatcctgtctgttgtggagtcccgggtcgggcacaggctttgcctttgctgaaagtttagcctgactggctgtgatgtgccctgctggcggcgagctattgctgtatgtgtcatggattcggtgatcgattggtggctggttcgttgtgtgtgggtgagtggtggttctgccatcgatggctctggttccttgtcactttcggctgtaccagcattgggcacatgcaaagcattgtgtgtgcacgccattgcctagcacaaatggagctcggccgcagcatcaacattgaacgcatgcaccaggtaacttggtcagagaagaccaacaaacaccgtcaggtagataattatgcaacaattgaatttaggtttcgaagcataatctaatagtactaggcatacacatatctaagac

SEQ ID NO: 1970 - DNA, 1418 bp, Setaria italica
gcagaggaggggaagggggagaggcgactctggaaacgaagcagcaatgggggactccagcggatcggcctccgtgtcggtggacgtcgagcgcatctctttcggcggcaaggagcatcttgtgaggacgagatgcggttctgtaacagttgcagtgtatggagacgaggacaagcctgcgcttattacctacccggatgtaggtttgaattacatgtcctgtttccaaggattgttcttctgcccggaagctgcgactttgctgctccacaatttctgcatataccacatcaatcctcaggggcatgagctgggagcggctccgatcccttctgatgtgccggtgccatctgttgatgatcttgctgatcaggttgcagatgtgcttgatttcttcagtttaggatctgtgatgtgccttggtgtcacggctggtgcctatgttctcacactctttgcgacgaaatatcaggagagggtaataggactgatgctggtttcccctctgtgcaaagccccatcctggagtgagtggttgtataataagatattgttgaatttgctctattattacgggactcgaggcctggtcaaggagtgcttgcttcagcggtactttagcaagagagtacgtggggatgcacaatatcctgagtcagatgtcgtgcaagcctgtaaaagtttacttgatgagaagcagggtgaaagtatttggcggtttctccagtcgataaatgagaggcataacttaacagactcattgaggaagttgcaatgccgcacactaatttttgtgggggagaactcagcattccatgaggatgccatccatatgaccgcaaagctggacaggaaatactgcgcgctagttgaggtgcaggattgtggctcgcttgtaaccgaggagcagccgtatgccatgctgatgccaatggagtacttccttatgggatatggactttacagaccgtatcagctgagcagcagcccacgcagtcctctgagcccatgttgtatatcgcctgagctgctatctcctgagagtatgggtgtgaagctgaagccaataaagactcgggtcgctatctgacttctaacactggcaaacaagtctcaggagtcagaatgaaaatggactacgtgcattacatttcatctcagaaaacagaagatagccacaagctggtcgctctagtgcacgagtggtggtcgcaccttgcttatataccatggcaaatggccatttttgttgacgataacatatataatgtacatcgaaaagaaagagcagaagggaaacccgtagtagagataaccaggacgtttctttgttcaatttgttttgtagtcagctgtcagcacaaatgtacatctcaaagtagtttgacagagacaataaaatcactctccagtgtttc

SEQ ID NO: 1971 - DNA, 1489 bp, Gossypium raimondii
aactacgaaacccatcttccatttgttatcattactgtagttcttttctcatattgttaagttggtattgctcagtttatatcctgtttgtattattgcctgcttaggccatgaagaatcttattgtcatgaataagagttctgttcttgtgtttttgcttgttgggttgtttgttttgtgtgaatgtgaagatgaagaccagttcttacctgtatctccaatggtgaagaaagaacaagaggcattatactcagctattcaaggatttgtggggaattcatggaatggctcggatctttacccagatccttgtggatggacacctatacagggagtttactgtgatctgctcgatgggtattggcatgtcactgttttaaatattggtctagtttttgacaactctcttcaatgtagcccaaatgcaaagttcacacatcacctgtttgagcttattcacttaagatcactctcattcttccattgtttttcctcgcctagagataaccccattagaatcccttcctcaaattgggaaagactctcaaacagcctagaatccttggagtttagatccaatggtggtctcattggtacaattccagtctccattagctaccttaaaaagctccgatcattagtgttactagaaaatggattaataggagacttgcctatagaattagggaacttggtgaatttaaagcaacttgtattggctggaaacaagtttactggtcaaatcccaccaagtttaggagggttaactgagttgttaataatggatttaagtagaaacaatctaacagggaccttgatgttgactttcgggtgtaatctcacttcattgctgaagttggacttaagcaacaataagttggaaggaaagatacctgaagggattggaaggttaaagaatgcaacacttttggaccttggcagaaacaagttctcaggtgggttgatacagtcatttcaacaactggtttctttaaaagagatggtgatatcaaataatccgcttgggggtgatctcatgggtgttgaatggggaaagttgcagaatttggagatattggatctttcaaatatggggttaacaggtttagtaccagaatccatggcagggatgaaaaagttaagatatttggggctaaatgacaacagtctgacaggaaatctttcaccaaagcttgcaagtcttccttgtctgaatgctctttatattaatgataataatctgacagggaagcttgagtttgcagaagggttttataagaaaatggggagaaagttcagagcttggaataattcaaatctttgctatcagcctgaaatgatcctatcatcatcatcatcaaagccatggtcttaatggggttaaactttgttaacaagaaacacaaaggagaaaacagttcttactactttgaatgaagtaaaaaaacagttctagtagaagggattttagaggctttattttctcag

SEQ ID NO: 1972 - DNA, 1074 bp, Setaria italica
ggatccggaaacgaagcagcaatgggggactccagcggatcggcctccgtgtcggtggacgtcgagcgcatctctttcggcggcaaggagcatcttgtgaggacgagatgcggttctgtaacagttgcagtgtatggagacgaggacaagcctgcgcttattacctacccggatgtaggtttgaattacatgtcctgtttccaaggattgttcttctgcccggaagctgcgactttgctgctccacaatttctgcatataccacatcaatcctcaggggcatgagctgggagcggctccgatcccttctgatgtgccggtgccatctgttgatgatcttgctgatcaggttgcagatgtgcttgatttcttcagtttaggatctgtgatgtgccttggtgtcacggctggtgcctatgttctcacactctttgcgacgaaatatcaggagagggtaataggactgatgctggtttcccctctgtgcaaagccccatcctggagtgagtggttgtataataagatattgttgaatttgctctattattacgggactcgaggcctggtcaaggagtgcttgcttcagcggtactttagcaagagagtacgtggggatgcacaatatcctgagtcagatgtcgtgcaagcctgtaaaagtttacttgatgagaagcagggtgaaagtatttggcggtttctccagtcgataaatgagaggcataacttaacagactcattgaggaagttgcaatgccgcacactaatttttgtgggggagaactcagcattccatgaggatgccatccatatgaccgcaaagctggacaggaaatactgcgcgctagttgaggtgcaggattgtggctcgcttgtaaccgaggagcagccgtatgccatgctgatgccaatggagtacttccttatgggatatggactttacagaccgtatcagctgagcagcagcccacgcagtcctctgagcccatgttgtatatcgcctgagctgctatctcctgagagtatgggtgtgaagctgaagccaataaagactcgggtcgctatctgatgagaattc

SEQ ID NO: 1973 - DNA, 1297 bp, Gossypium raimondii
cctgtttgtattattgcctgcttaggccatgaagaatcttattgtcatgaataagagttctgttcttgtgtttttgcttgttgggttgtttgttttgtgtgaatgtgaagatgaagaccagttcttacctgtatctccaatggtgaagaaagaacaagaggcattatactcagctattcaaggatttgtggggaattcatggaatggctcggatctttacccagatccttgtggatggacacctatacagggagtttactgtgatctgctcgatgggtattggcatgtcactgttttaaatattggtctagtttttgacaactctcttcaatgtagcccaaatgcaaagttcacacatcacctgtttgagcttattcacttaagatcactctcattcttccattgtttttcctcgcctagagataaccccattagaatcccttcctcaaattgggaaagactctcaaacagcctagaatccttggagtttagatccaatggtggtctcattggtacaattccagtctccattagctaccttaaaaagctccgatcattagtgttactagaaaatggattaataggagacttgcctatagaattagggaacttggtgaatttaaagcaacttgtattggctggaaacaagtttactggtcaaatcccaccaagtttaggagggttaactgagttgttaataatggatttaagtagaaacaatctaacagggaccttgatgttgactttcgggtgtaatcttacttcattgctgaagttggacttaagcaacaataagttggaaggaaagatacctgaagggattggaaggttaaagaatgcaacacttttggaccttggcagaaacaagttctcaggtgggttgatacagtcatttcaacgactggtttctttaaaagagatggtgatatcaaataatccgcttgggggtgatctcatgggtgttgaatggggaaagttgcagaatttggagatattggatctttcaagtatggggttaacaggtttagtaccagaatccatggcagggatgaaaaagttgagatatttggggctaaatgacaacagtctgacaggaaatctttcaccaaagcttgcaagtcttccttgtctgaatgctctttatgttaatgataataatctgacagggaagcttgagtttgcagaagggttttataagaaaatggggagaaagttcagagcttggaataattcaaatctttgctatcagcgtgaaatgatcccatcatcatcatcatcaaagccatggtcttaataa

SEQ ID NO: 1974 - DNA, 1590 bp, Echinochloa colona
gacggaagcctaatttcacggggaagatcgccgtggctgctgccctcactgtcatgtgcataatcgtgttgaaacaatcgcctagtttcagcggtacgagtgtgttctctcgccatgaaattggggtgacccatgtgttagtaacaggaggtgctgggtatattggctcgcatgctactcttcgtctccttaaggacaactaccgagttaccattgtggataacctttcacgaggtaacatgggagctgtaagagtccttcaacggctatttccacagcctggaaggcttcaatttatttatgctgatttaggcgatgccaaagctgtgaacaaaatattttcagagaatgcatttgatgctgttatgcactttgctgctgttgcttatgttggtgagagcacaatggagccactcaggtactaccacaacataacatcaaacacattgacagttcttgaggcaatggcagcacataatgtaaatactctgatttactcgagtacttgtgcaacctatggtgaacctgatacaatgcctattgtagaaacaactcctcagaatcctatcaatccatatggtaaggcaaagaagatggctgaggacatcatcttagatttcacaaaatcaaagaaatcaaacatggcagtcatgatcttaaggtacttcaatgtgattggatcagacccagagggacggctaggagaagctccaagaccagagctgcgtgagcatggacggatttctggcgcttgctttgatgcagctttaggaaccattccagggttgaaggttcatggaaccaattaccccactgcagatggaacttgcattagggactacattgatgtcacagatcttgtagatgcccatgtcaaagctcttgataaagctcagctaggcaaagttggaatctacaatgtcggcacaggcaaaggtagatcagtgaaggagtttgtagaagcttgcaaggaggcaacaggagcttccatcaaggtttcatatcttaaacgtaggcccggagattatgccaaggtatacagtgacccatcgaaaatccacaatgagctcaactggacagctcaatacactgatcttggccaaagcctttcccaggcatggaaatggcagaaagcccacccaaacggatatggatcagcttgattcagagtttaataggttcagaggttcatcacgcagattcatgggtccgtgtgcagtcatataggcttcagaagttggtacttcaccatagaaacacatagcaaacagccacagaaagtcctgaattttttgattcatgggtccatgtgcagtcatggaaaaagagacagaatgacagagaccccccccccccccccccccccccccccccccccccccccccccccccccccccccccccccccccccccccccccccccccctgaggcactatataataacacaaatgcaaaattgtgttgtagacagagtagatcaatcctgtgtacgaaacctattatggtggtggaatgaaaggatataaataagttttatgtatctgtccaacgtgacaatgcatttctctcgataagtgatctcgcacgc

SEQ ID NO: 1975 - DNA, 1442 bp, Saccharum officinarum
gccatgaaactggagtgacccatgtgttagtaacaggaggtgctgggtatattggctcacatgctactcttcgtctccttagtgacaagtaccgagttaccattgtggataacctgtccagagggaacatgggagctgttagagtccttcaacggctatttccagaacctggaaggcttcaatttatttatgctgatttaggcgatgccaaagctgtgaacaaaatattttcagagaatgcatttgatgctgttatgcactttgctgctgttgcttatgttggtgagagcacaatggagccactcaggtactaccacaacataacatcaaacacattgacagttcttgaggctatggcagcacataatgtaaatactctgatttactcgagtacatgtgcaacctatggtgaacctgatacgatgcctattgtagaaacaactcctcagaatcctatcaatccatatggtaaggcaaagaagatggcagaggacatcatcttagattttacaaaatcaaagaagcaatcaaacatggctgtcatgatcttaagatacttcaacgtgattggatcagacccagagggacggctaggagaagctccaaggccagagctacgtgagcatggacggatatctggtgcttgctttgatgcagctctgggaatcattccagggctaaaggttcgtggaactgattaccccactgcagatggaacttgcattagggactacatcgatgtcacagatcttgtagatgcccatgtcaaagctcttgataaagctcagccaggcaaagttggaatctacaatgttggaacaggccaaggtagatcagtgaatgagtttgtgaaagcttgcatgaaggcaacaggagcttccatcaaggttgaatatcttgcccgtagacccggagattatgccgaggtatacagtgatccatcgaaaatccacagggacctcaactggacagctcaatacactgatcttggccaaagcctctcccaggcgtggaaatggcagaaagcgcacccaaacggatatggatcagcctgattcagagttggaaggttgagagactcatcacgcagatccaaggggtccatgtgcagtcatatagccttcagataattggttcttcaccatagaaacatagcaaacagcaacagaagagtcgtgattcttttattgcagcgctggaagaagacaaagtatcacagagagaacgccctacctgttccttgattagtttcatatatataggtcctctttttgttgttggcattttaatatgttttgatatgtgtgctgaggcactatataataacacaaacgaaattgtgttgtagacagggtagatcaatctcgtatatcaaccttcgtggtggtagaatgaaaggatatatataaataagttgatgtatgtttttgtttccggacttg

SEQ ID NO: 1976 - DNA, 2633 bp, Ananas comosus
tctgtttccaggtacggggctctactttttcatatgactccgattcaaaaaagctcgttttttggctctttgatccgttttgtgatgtgggttctctctatttcgcgctttttcgatctcggttcgtctcgatcacgcgtcttttgggctctgtttgggcgtttccttttcgtttttgcttgttaatcgcgttccttgtgttgagtgcgtgaattgggagctgttttatatattggggtgtgattgggctcgaaaggtcgaatttttattggggcttttggggattataattctatatcactttgagctgtttgattatttggtgacgtgtatacacttttgttcttcgaatttggccatgtttaatttttcgctttcttttaatatgtgagattcggattactcgtgttcaatgagttgttctcctactattgttcccttatatcgttgactttgtcgttttcgttcagttccaagctataaagttggaatttttcctgcaaaacaaagctcaaaagttggaattttacgccctttttcgttcatcaaatgttcgcttcctctccttttctttgtgtcctcaatcaatcaactttaaaactttttctgctttagttttcaatggttttgactaggagccattacaattttgtaattttccttctatttcaaaaattttagggcttatttcctcttttttgctcctgtgtgggaagtatatgctgttctttgtatcttcgtatatgcgacaattaaacgcactttataccaatgctgttatgcttatatcattggtttttaggggggtgtttcatctcatttccttaagttgaaatttcgatccttggttctaacaattcataagttgttctaataatggcttattttgctatatctatctattactattatgaaatcaaaacttcttttgtgatttttacccttaatagtaactcaattttgtttttatttgcgtagatatcttgttccggtcggctcgacgagtttatttcaccggagagggctatattttcacccataagttgcgtggccaaggagaatagttctgctgttatcgattcattgataagataatttttcacatgctaccagtcaataggagcagaagtcagccgagggccggtagatcttggcccttctcaggaatggagttctcagattcaagacgcaagcctcattttcttgggaaagtaatcaccgccgttgttcttacggccttgtgcatatatattctgaagcaatcccctggttttggtggcactagtgtgttttcacgtcatgaccccggagtaacccatgtcttagtaactggaggtgctggctatattggttcgcacgctgcgcttcggctcttaaaggactcctatcgagttactatcgtggataacctctctagaggaaatatgggtgccgtgaaagtcctccaggagctattcccggagcctgggagacttcaatttatctatgctgatttgggcgatgcgaaagctgtgaacaaaatattcgcagagaatgcattcgatgctgtaatgcactttgccgcagtcgcatatgttggcgagagtacaatggaacctcttcggtactatcacaatatcacggctaatactttgactgttctggaggccatggcagctcatggtgtgaaaactctgatttattcaagtacatgtgcgacttacggagaacctaagaagatgccgattacggaagttactcctcagtctcctatcaacccgtatgggaaagccaagaaaatggcggaggacattatattagatttctcaaagagatcagacatggctgttatgatactaaggtactttaatgtcattggatcggacccagaaggtagattaggggaagctcctagaccggaattgcgagagcatggcaggatatctggggcgtgcttcgatgcggctttaggagttattccgggacttaaggttaaaggaacggactatccgacagctgacggaacctgtatcagagactatatcgatgtcacagatctagtcgatgcgcatgtcaaggcacttgacaaggcggagcctaagaaagttggcatttacaatgttggcaccggacaaggtagatcagtaaagcagtttgtggaagcatgcaagcaagcaaccggagcaaagataaaagtcgagtatctcagccgcaggccgggagactatgccgaagtctacagcgaccccgcgaagatcaaccacgagctcaactggacggcccgctacaccgacctgcaggagagcctctcgatcgcgtggcgatggcagagatcgcatcccaacggctacgggagatcctaaaaacacatagcttgtcgattcaactcctctgaatatgagagatagaatttgggcacgagtttgttttctaccatgtattgtattgcgtaaattttatcataagagggtgatatttttttggcaaaatttggtaggggtcaggataggagcatatatttcatttattattatttttttccttacatgtcagcaaaacagaatctaataaccagttcagttgattgctatacacccctctcccccaccttgattaatctcatgtgtattatgcttttgttataaattacggtg

SEQ ID NO: 1977 - DNA, 1707 bp, Daucus carota
gtgtgctaaaaattcaatctttttgtattcaaagtcttctttcttgatgcccacctatacatacatgttctatacatacccttttgcacctgcccctctttttaaccgatttaaacgccccctccaccttctttgcctctgtgtttacaggttacatcaattttgcagtcaagaaggcgtctttgtcattgatttcaaagactgtcctttttactcttaaaattagcatttattctgcaaatgctaaattttaataggtctagaagtcaggcaagaactaacagatccatgtctttaggaggcatggatttcgtggatccgaagaagaaaagcagttatgtaggaaaaattcttttggccgcctccttaacagcattttgcattctcgtgctcaaacaatctccaacttttaacactccaagcgcgttctcacgtcatgaaccagggattacacacgttctagtaacaggaggagctggttatattggttctcacgctgttctgcggcttttgaaagattcttatcgcgtgactatagtggacaatctctctcgtggaaatcttggcgctgtcaaagttctacaaggactgttccctgaacctaacagacttcaatttatatatgctgacctgggggatgcgaaagctgtgaacaaaatattttcagaaaacgcttttgatgctgtgatgcattttgcagctgtggcatatgttggagagagtacccttgatcctttgaggtactatcacaatatcacatcaaataccctagtggtgttggaggctatggcagcacatggtgttggcactctaatatattcaagtacatgtgcaacatacggggagcctgaaaagatgcctattacagaagaaacccctcaggttcctattaatccatatgggaaagctaagaagatggctgaagatattattctggatttccatacaaactcgaacatggctgttatgattttgagatacttcaatgtaattggttcagacccagagggaagacttggagaagctccaagaccagaactacgtgagcacggacgaatatcaggtgcttgctttgatgcagctcgaggaatcattcccggccttaaggttagaggaacagattataaaactgcagacggaacttgcatacgtgactacattgatgttaccgatcttgttgatgctcatgttaaagcccttgagaaagcaatgcctggaaaagttggaatctacaatgttggaactggaagaggtagatctgtaaaggagtttgttgaggcttgtaaaaaggcgactggggtaactatcaaagttgactttcttgatcgccggcctggtgactatgctgaagtgttagccgaccccacaaaaatcttgcgtgagcttaactggaccgctcaatacactaacctccaagaaagtctgcaggtggcttggagatggcaaaagtctcatcttaatggttacaattcataaacccacagtacagttatagtggaagattagttggatacccacccagtgtatgattttgcccagttctaaattacttatggtagaggggttttgacatgctcacatatttattaaagtatgttacgttgttatacaggtagtgttttaggaagtagccttcgattatgataatgtaacaccctatttaaataataatgccagtttggtatgattaatttacatcattttccc

SEQ ID NO: 1978 - DNA, 1778 bp, Daucus carota
ttatgatattttgtccatctgggcttgctttatgttgaattatttttggtgggctgtttgtgtttttgctaatacttggaattttgaaattctaatgttttacctcttccacttgttataggctccatttcttgtttgtaagatttccagtgtttcctgactaactttcttctttttgttcgtagttttactaattatttgttcttcgtttactgcatcaggttacatcaattttgcagtcaagaaggcgtctttgtcattgatttcaaagactgtcctttttactcttaaaattagcatttattctgcaaatgctaaattttaataggtctagaagtcaggcaagaactaacagatccatgtctttaggaggcatggatttcgtggatccgaagaagaaaagcagttatgtaggaaaaattcttttggccgcctccttaacagcattttgcattctcgtgctcaaacaatctccaacttttaacactccaagcgcgttctcgcgtcatgaaccagggattacacacgttctagtaacaggaggagctggttatattggttctcacgctgttctgcggcttttgaaagattcttatcgcgtgactatagtggacaatctctctcgtggaaatcttggcgctgtcaaagttctacaaggactgttccctgaacctaacagacttcaatttatatatgctgacctgggggatgcgaaagctgtgaacaaaatattttcagaaaacgcttttgatgctgtgatgcattttgcagctgtggcatatgttggagagagtacccttgatcctttgaggtactatcacaatatcacatcaaataccctagtggtgttggaggctatggcagcacatggtgttggcactctaatatattcaagtacatgtgcaacatacggggagcctgaaaagatgcctattacagaagaaacccctcaggttcctattaatccatatgggaaagctaagaagatggctgaagatattattctggatttccatacaaactcgaacatggctgttatgattttgagatacttcaatgtaattggttcagacccagagggaagacttggagaagctccaagaccagaactacgtgagcacggacgaatatcaggtgcttgctttgatgcagctcgaggaatcattcccggccttaaggttagaggaacagattataaaactgcagacggaacttgcatacgtgactacattgatgttaccgatcttgttgatgctcatgttaaagcccttgagaaagcaatgcccggaaaagttggaatctacaatgttggaactggaagaggtagatctgtaaaggagtttgttgaggcttgtaaaaaggcgactggggtaactatcaaagttgactttcttgatcgccggcctggtgactatgctgaagtgttagccgaccccacaaaaatcttgcgtgagcttaactggactgctcaatacaccaaccttcaagaaagtctgcaggtggcttggagatggcaaaagtctcatcttaatggttacaattcataaacccacagtacagttatagtggaagattagttggatacccacccagtgtatgattttgcccagttctaaattacttatggtagaggggttttgacatgctcacatatttattaaagtatgttacgttgttatacaggtagtgttttaggaagtagccttcgattatgataatgtaacaccctatttaaataataatgccagtttggtatgattaatttacatcattttccc

SEQ ID NO: 1979 - DNA, 1659 bp, Panicum virgatum
cgggatgcgcggcgagagcgggtgcgtccgcaacaaatccaatccaaaacagacggggctcggttcggcagggggtgcagcgacccacccggtgagtttgactcctcgtccggcccccgtccgtcggtgaagggatgaccaaaccgagcaggagcagcctgcggcgccgtatatatacgcgcccgcgcgcggaggcggaggcggaggctgagccgaggaggagggaagtggggagaggcgccttggaagcgaagcagcaatgggggagtccagcggttcggcctccttttcggtggacgtcgagcggatctccttcggcggcaaggagcatcttgtgaggacgagatgtggttctgtaacagttgctgtgtatggagacgaggacaagcctgcgcttgttacctacccggatgtaggtttgaactacttgtcttgtttccaaggattgttcttctgcccggaagctgcgtctttgctgctccacaatttctgcatctaccacatcaatcctcaggggcacgagctgggagcggctccaatcccatgtgatgtgccggtgctatctgttgatgatcttgctgatcaggttgcagatgtgctcgatttcttcagtttaggatctgtgatgtgcctcggtgtcacggctggtgcctatgtcctcacactctttgcgacaaaatatcgggagagggtaataggactgatgctggtttcccctctgtgcaaagccccatcctggagtgaatggttgtataataagttattgttaaatttgctctactattacggcactcgaggcctggtcaaggagtgcttgcttcagcggtactttaacaagaaagtgcgtggggatgcacaatatcctgaatcagacattgtgcaagcctgtaaaaatttgctcgatgagaagcagggtgaaaatatttggagatttctccaatcgataaatgagaggcatgacttaacagactcattgaggaaactgcaatgccgcacactaatttttgtgggagagaactcagaattccatgaggatgccatccatatgaccgcaaagctggacaggagatactgcgcactagttgaggtgcaggattgtggctcccttgtaactgaggagcagccgtatgccatgctgatgccaatggagtacttccttatgggatatggactttacagaccgtatcagctgagcggcagtcctcgcagtccactgagcccgtgttgcatatcgcctgagctgctatctcctgagagtatgggtgtgaagctgaagccaataaagactcgggtcgccgtcgacttctaataatgggaaacaagtctcaggagtcagaatcaaaacggactacctatattacattacatctcagaagactgaaggcagccacaagctgattgctctaggaggagtgatggtcgctttgcttatatatggcggcaaatagccatttttgttgatgataacatatataatgtagataaaaagaaagagcagaggggaaccccatagtagagataaccaagatgtttctttgttcaatttgttttgtagtcagctgtcatcacaaatgtacatctcaaagtagtttgacagaaacaataagaaaagaatcactctccagggttccagatgtttgtctttcataccgaaaaaaa

SEQ ID NO: 1980 - DNA, 1665 bp, Sorghum bicolor
cgacgacccacccggtgagtttgacccctcgcccgcccgcccgttcgtcggtgaagtgaagggatgaccaaccgagcagcagacggctgcggcgccgtatatatagccgcccacgcgcggtggcggaggcgctatgagccgagacgagccgagccgaggaagcggggggcctggcactagcaggaggtcggcggagggagcaatggcggaatctagcgggtacgggtccgtgtcggtggacgtcgagcggatctccttcggcggcaaggagcatcttgtgaggacgagatgtggttctgtaaccgttgctgtgtatggagacgaggacaagcctgcgcttgtaacatacccggatgtaggtctgaattacatgtcctgtttccaaggattgttcttctgcccggaagctgcgtctttgctgctccacaatttctgcatctaccacatcaatcctcaggggcacgagttgggagcagctccgatatcatcagatgttccggtgccaactgtggatgatctcgctgatcaagttgcagatgtgcttgatttcttcagtttaggatctgtgatgtgccttggtgtcacggctggtgcatatgttctcactctctttgcgacgaaatatcgggagagggtaataggactgatgctggtttcccctctgtgcaaagccccatcgtggagcgaatggctgtataataaagtattgttaaatttgctttattattacgggactcaaggcctggtcaaggagtgcttgcttcaacgttactttagcaagaaactgcgcggggatgcacagtatcctgaatccgacatagtgcaagcctgtaaaagtttacttgatgagaagcagagtgaaaatatttggcggtttcttcactcaataaatgagaggcatgacttaacaaattcattaaagaagctgcaatgccgcacgctaatttttgtcggcgagaactcagagttccatgaggatgctatccatatgaccacaaaactggaccgcagatactgtgcactagttgaggtgcaggattgtggctcccttgtgaccgaggaacagccttatgcgatgctgatgccaatggagtacttccttatgggatatggactttatagaccgtatcagctaagcagcagcccacgaagtccactaagtccatgctgtataccgcctgagctgctatctcctgagagtatgggtgtgaagctgaagccgataaagactcgggtcgctatcaatttctaacactggcaagcaagccttttgcatcagaatgaaaacagaccacctttcttagaaacctgaagacagccacaatctgatcgctctaggcacagaagtggtggtcacaacttggttgtataacatggcaaatggccatttctgttggagataacctatataatgtacatcacaaaaaaaaaacagggtaagggggaccctgtagttgagataaccagtatgtgtctttgttcaattagtttgtgtagtcagctttcagcacaaatgtaaatctcaaagtagtttggcagaaacaataagaatccatctccagggtctcagatgttcaaatttcataatgacaaaattttgtcatgtgttgcactactgcacctgctgtttctggattacaaaggactagatatacacacttattt

SEQ ID NO: 1981 - DNA, 1659 bp, Zea mays
gagccgaagaaggacgggtccggggggtcgcggaaggagcaatggcggaatcaagcggctccggttccgtgtcggtggacgtcgagcggatctccttcggcggcaaggatcatcttgtgaggacgagatgtggttctgtaaccgttgccgtgtacggagacgaggacaagccagcgcttataacgtacccggatgtagctctgaactacctgtcctgtttccaagcatttttcttctgcccggaagtggcgtctttgctgctacacaacttctgtgtctaccacatcaatccccagggacacgagatgggagcagctccaatgtcgtcagatgtgccggtgccatctgttgatgatctcgctgatcaagtcgcagatgtgcttgatttcttcagtttaggatctgtgatgtgccttggtgtcaccgctggtgcgtatgttctcactctctttgcgacgaaataccgggagagggtaataggattgatgctggtttcccctctgtgcaagtccccgtcgtggagcgagtggctgtataataaagtgttattaaatttgctttattactacgggaatcaaggcctggtcaaggagtgcttgcttcaacggtactttagcaagaagctgcgtggggatgcacagtgtcctgaatccgacatagtgcgagccagtagaagtttacttgatgacaagcagggcgaaaatatctggcggtttcttcactcaataaacgagaggcatgacttaacagattcgttaaagaagctgcaatgccgcacgctgatcttcgtcggggagagctcacagttccacgaggatgctatccacatggccacaaaactggaccgcagatactgcgcgttagttgaggtgcaggactgtggctcccttgtgaccgaggagcagccccacgcgatggtgatgccaatggagtacttcctcatgggatacgggctctacaggccgtatcagctaagcagcagccctcgcagtccactgagcccatgctgtatatcgcctgagctgctgtctcctgagagtatgggtgtgaagctgaagccgataaagacccgggttggtatcagtttgtagcactggcaagcaagccttttgaaccagaatgaaaggcaggctacctgtcttagaatcctcttgcagttgtataacatggcaaatggccattcctgttggagataacctatatatcatgtacatcacaaaaaaaagggtataagagggaccctgtagtggaggtaacgggtaaccaggatgtgtctttgttcaattagtttgtgtagtcgccggctttcagcacaaatgtaaatctcaaagtactttgacaggaacaataagaatccatctccagggtttcagatgttcaaatttcatggcgacaaaactttgtcatctgttgcgctactgcacctgttgtttctggatcacaaagtgcttgacatacatacctatttgatttccttgcaaattcagttatagttggaccagtactcatcgacaagcttacaaaatgcagagttcttatcttccatcagaaccgatggcgcgctgtactcgaccatcttgcctgcagatatggcagaaacctattacatcaacttggcgatactccagaaaggctctactttgtcagtgaatgtgtctc

SEQ ID NO: 1982 - DNA, 1118 bp, Oryza sativa
ggaggaggaggagaagcttctagaaggggagcggggcggcatgggggactcgagccggtcggtgtccatcgacgtggagcggatctccttcggcggcaaggaacaccgagtgcgaaccagatatggctctgtatctgtttctgtatttggagatgaagacaagccggcgctcataacatacccggatgtagctctaaattatatgtcttgctttcaaggattgttcttctgcccagaggccgcgtcgctgttgcttcacaatttttgtatttaccacatcactcctcaaggtcatgagttgggagcggctccaatttcatccgatgtgcccgtgccatctgttgatgagcttgtggatcaagtcgcggatgttcttgatttcttcggattaggatctgtgatgtgtttgggtgtcactgccggtgcctacattctcaccctctttgcaacaaaataccgggatagagtgattggccttatgctagtttcgccgctatgcaaagccccttcttggagcgagtggttgtacaataaggtattattaaacttgctttactattatgggagtcgtgggctagtcaaggaatgcttgcttcagcggtattttagcacggaagttcgtgggaatggacaagaccctgaatcagagattgtgcaagcctgtagaagtttacttcatgagcgacagggatctaatgtatggcgattccttcaggcgataaacgagagacatgacctgacggaagcgttgaagaagcttcagtgtcggacactgatttttgtgggagagaactcacagttccacgacgacgcagtccatatgaccacaaagctagaccggagatattgcgccctagtcgaggttcaggcatgcgggtcactcgtcaccgaggagcaaccgcacgcgatgttgatccccatggagtacttcctcatgggatatgggctctacagaccttcccagctggatagcagcccccggagcacactgaacccattctgtatatcgcctgaacttctgtcaccggagagcatgggagtgaagctgaagcccatcaagactcggatctcgctcaaagtttagcaattggcaaatgaatgaatccttgatggcctga

SEQ ID NO: 1983 - DNA, 1522 bp, Panicum virgatum
ggaggagagagagagagagagacaggagggagggggaggggctcggaagcggtggggttggtggcgcagcaggaggaggaggaggagcttctagaggagggttaagggaggcgggtgcgccatgggggactccagcggctcggtgtcgatcgacgtcgagcggatcttcttcggcggcaaggaacatcgagtaagaacgagacatggccctctttcggtttctgtatatggagacgaagacaagcccgcgctcataacttatccagatgtagccttgaatcacatgtcttgcttccaaggattgttcttctgtccagaggctgcgtcgctgttgcttcacaatttctgtgtctaccacatcacccctcaaggacacgagttaggagcggctccgatttcatctgatgtgcccgtgccatctgtcgatgaccttgcagaccaggtcgccgatgtccttgatttttttagtttaggtgctgtaatgtgcttgggtgtcaccgctggtgcctatgttctcaccctctttgcgacaaagtatcgggagagggttcttggcctcatgttggtttcacctctatgcaaagccccttcatggagcgagtggttgtataataaggtattattaaacttgctttattattatgggacacgtggcttagtcaaggaaagcttgcttcagcgttatttcagcatggaagttcgtggcaacggtcaagatcctgaatcagatattgtccaagcctgcagaactttacttgatgaaaggcagggagctaatgtctggcggttccttcaagcaattaacaggcggcatgacttaacggaatcgttgatgaagcttcagtgccggacgctaatttttgtgggagaaaactcacaattccatgccgactcagtccacatgaccacaaaactagaccggagatactgcgctctagtcgaggttcaggcttgtggttcactggtgaccgaagagcagccccatgcgatgctcattcctatggaatacttccttatgggatacgggctttacagacctccacagcaggaaactagcccccggagtacactgaacccgttctgcatatcccctgaacttctgtcacctgagagcatgggggtaaagctgaagccaatcaagacgcggatctcactgaacatttagcatgggcggatcatggatggccatggcctgacaagtgacaaccacagctcatgaaagtgaagactgcttgggctgagttttgcaaccacaagttttgatgcctttcggcgcctggtggtacgcgaagaaaattctacaggctgaaggcagtttttgttgatgcggggaggttgtagtattgtaggggagggcagaatggcagatggctgtttgttcatatgtttgtagtcagtacacatgtatatctcacgatatcgtttcatacagaaatataaatggaaaagctgaattccactcagattctcgcatcaactctagagaacaccagcacgggtggaaacatacggcggctagagc

SEQ ID NO: 1984 - DNA, 1597 bp, Brachypodium distachyon
agaaaggcaggatagccaggcccacgaggaggaggaggaggaagcgagagagagagagagagtaatgggggagtcgagctcgagcgggtcggggtccgtgtccgtggatgtcgagcggatctccttcgcccgcaaggagcatcaagtgagaacgagatggggctcctctgtgtccgtcgcggtgtacggtgaccaagacaagcccgcgctggttacataccctgatgtagccttgaactacatgtcctgcttccaaggactgttcctctgcccggaaacagcttctctgctgctccataacttctgcatataccacatcaacccccagggccacgagttgggagcggctccggttcactctgatgttccggtgccatctgtcgatgacctcgccgatcaggtcgcggatgtgcttgattacttcagtttaggatcggcaatgtgcctgggtgttacagctggtgcctacgtcctcactctttttgcgacgaaatatcacgaaagggtggtagggcttatgctggtttcccctctgtgcaaagccccatcatggagtgaatggctgtacaataaggtgttgctaaatttgctttattactacggcacgcgaggcttggtcaaggagtgcttgcttcagaggtacttcagcaaggaaatgcgtggcagcgctcagtgccctgaatcatacatcgtgcaggcctgcagaactttgcttggtgagaggcagggtgagaatgtctggcgatttctccactcaatgaacaagaggcatgacttaaccgaggcgctgaggaagctccgatgccggacgctgatattcgtgggagagaactcgcagttccacgaggatgccatccatataacaacgaaattggaccggagatactgcgcgctagtcgaggttcagggctgcggctcccttgtgaccgaggagcagccgcaggcgatgctgatgccgatggagtacttcctcatggggtacgggcttcgcaggccgccgtcgtatcaggtggtgagcaacggcagcccgcgcggcccgttgagcccgtgtcgcatatcgccggagctgctgtctcccgagagcatgggggtgaagctgaagcccatcaagacccggatctcgcttgacttctgatgctggcaaagcgcctcgctcgatccgggatctcagagaactgtaggcgtgcgagttttgattgaactcgcgtactgcgtatataccccgagaatggaagtttttgttttgttttgttttgttttgttttgttttggatagcctataatctacatcagcgaagtcgagcagagggtaatctgtgctggagatgtggacagggcggttctttgttcggttcgttttctgtagttagcacaatagtatatgttatacaggagtagtctgacacagcagaaataaggatccatggtaaatcggaaaggagacgaccaaaaagattggctaaactctatttttttatcactagcagaagaatgcccacagtacgaaatactcattggtcattacacctccgaattaataataggcacacatcgtgaacaagtaaaggcaacctaaaaatgcaacaacaattaccgt

SEQ ID NO: 1985 - DNA, 1414 bp, Zea mays
gagttcaggggggagccagcgaagacaagacaagccaggccagcggcggaggagagggagagagagagagagagcacgcgacagtaggcaggagggcgaggaggagcttgtagagggttaaggaaggcgaccgccatgggggactccagcggctccgtgtcggtcgacgtcgagcggatcttcttcggcggcaaggagcatcgagtaagaacgaggcatggctctctttcggtttctgtgtatggagacgaggacaagcccgcgctcgtaacttatccggatgtagccttaaatcacatgtcttgcttccaaggattgttcttctgtccggaggctgcgtccctgttgcttcacagtttctgcgtgtaccacatcacacctcaaggacacgagttgggagcagctccgatttcagctgatgtgcctgtgccatctgtcgacgaccttgcagatcaggttgctgatgtcctcgattttttcagtttagggtctgtcatgtgcttgggtgtcactgctggtgcctatgttctcaccctctttgcaactaagtatcgggagagggttcttggcctcatgttggtttcacctgtatgcaaagccccctcctggagcgagtggctgtataataaggtattatcaaacttgctttattactacgggacacgtgggttagtcaaggaaagtttgcttcagcggtacttcagcatggacgttcgtggtaacgggcaagatcctgagtcagagattgtccaagcctgcagaagtttacttgacgagaggcagggagctaacgtctggcggttccttcaggcaattagcaggcggcatgacttaacggaatcgctgaagaagctcaagtgccggacgctgatctttgttggagaaaactcacagttccatgcggacgctgtccacatgaccacaaagctggaccggagatactgcgctctagtcgaggttcaggcttgtggttcacttgtcacagaagagcagccccatgcgatggtgatcccgatggaatacttcctcatggggtacgggctctacaggccatcgcagcaggaaagcagcccccggagcacactgagcccgttctgcatatcacccgagcttctgtcaccggagagcatgggggtgaagctgaagcccatcaagacgcgcatctcgcttaacgtttagcatgggttgacaaccacagctcagctcatgaaagtgaagacgactccttgggctgagttgtgcagacacagttttgatgcctttcggcacctagcgttcgaagatctacaggtagaaggcagatttgttgttaatggctgtttttgttcatatatataatatatgatatgtaacttagtacacatgtatatctcaacacgtcatcgtttcatacagtacagaaaaacaaaatgtg

SEQ ID NO: 1986 - DNA, 1506 bp, Leymus cinereus x Leymus triticoides
ccgttgctgtcggagcgagagaggccctgaaccggaaggaagaggcgagcgaggcggaggaggaagaggttggtaggctgttgagaagaagcttctagaagccgccatgggggactcgagcgggtcggtgtccatcgacgtggagcggatctacttcggcggcaaggagcatcctgtgagaacaagatacggctctgtatctgtttctgtgtacggagacgaagacaagccagcgctcataacatacccggatgtagctctaaattacatgtcctgcttccaaggattgttcttctgcccagaggctgcctccctgttgcttcacaatttttgtatttaccatattactcctcaaggccatgagttgggagcagctccaattccatcggatgtacctgagctatctgttgataacctcgccgatcaggtcgcggatgttcttgattccttcggtttcgggtctgtgatgtgcatgggtgtcaccgccggtgcctacgtgcttaccctctttgcaccaaagtacagggaaagggttcttggcctgatgttggtttcacctctatgcaaagccccatcttggagtgagtggttgtataacaaggtattgttaaacttactttattattgtggcactagtggactagtgaacgaatgcctccttcagcggtattttagcacggaagttcgtgggagtggacaagaacctgaatcggaaattgttcaggcctgtagaagtttacttgatcagaggcagggtgttaatgtatgtcgattccttaaagcaataaacgagagacatgacttaactgaagcactgaagaagctccggtgccggacgctgattttcgtgggagagaactcacagttccatgccgacgctgtccacatgaccacaaaactagatcggagatactgtgctctagtcgaggttcaggcatgcgggtcgctcgtcaccgaggagcagccacacgcaatgctgatcccgatggagtacttcttgatgggatacgggctctacagaccgtcccagctcgagagcagcccccggagcaccctgaacccgttctgcatatcgccggagctgctgtcgcctgagagcatgggggtgaagctgaagcccatcaagactcggacctccctcaatgtttaaacaacatgtggtggagatcttggatggcctgacgatacagctcgcaaaaaagcgaagactgcttggttgagctgatcggagcacggtcaccatcgcgagacaagttttgataccttccggtaccttggcacgcacccatgcatagatggatacgttaatggcagcatttgctgtagattgctgtaagcctgtaatctacgtcttctgggataggcaaggggaatagggtgaggttgtaggggaggaatacggctgtttgtttctttgttgatatgctttgtagtagtccacatgtgatatatgtcatcagatcatttccccacaggaaagcaatatatatatgataaagcaaaaaa

SEQ ID NO: 1987 - DNA, 1209 bp, Hordeum vulgare
ctcgcgtatatatgcacgcgatagacgccaagggtggggggaaggaggagacagagcgagagagccggaagaggaagaggaagaggcgagcgacgacgacgacgaggaggaggaggaaggggttgttggtgggctgttgagaggaagcttctggaagccgccatgggggactcgagcgggtcggtgtccatcgacgtggagcggatctacttcggcggcaaggagcatcctgtgagaacaagatacggccctgtatctgtatccgtgtacggagacgaagacaagccagcgctcataacgtacccggatgtagctctgaattacatgtcctgcttccaaggattgttcttctgcccagaggctgcgtccctgttgcttcacaatttttgtatctaccatattactcctcaaggccatgagttgggagcagctccgattccatcggatgtacctgagctatctgttgataatctcgcggatcaggtcgcggatgttcttgatttcttcggtttagggtctgtgatgtgcatgggtgtcaccgccggtgcctacgtgcttaccctctttgcagcaaagtacagggaaagggttcttggcctgatgttggtttcacctctatgcaaagccccatcttggagtgagtggttgtataacaaggtattgctaaacttactttattattgtggtactagtggactagtgaacgaatgcctccttcagcggtattttagcacggaagttcgtggtagtggacaagaacctgaatcggaaattgtccaggcctgtagaagtttacttgatcagaggcagggtgttaatgtatgtcgattccttaaagcaataaacgagaggcatgacataactgaagcactgaagaagctccggtgccggacgctgattttcgtgggagagaactcacagtttcatgccgacgctgtccacatgaccacgaaactagatcggagatactgcgccctagtcgaggttcaggcatgcgggtcgctggtcaccgaggagcagccacacgcaatgctgatcccgatggagtacttcttgatgggatacgggctctacagaccgtcccagctcgagagcagcccccgcagcaccctgaacccgttctgcatatcgccggagctgctgtcgcccgagagcatgggggtgaagctgaagcccatcaagactcggacctccctcaatgtttaaaca

SEQ ID NO: 1988 - DNA, 1522 bp, Secale cereale
cgacgacgaggaggaggagagagagaggaagaggttgttggtaggctgttgagaggaagcttctagaagccgccatgggggactcgagcgggtcggtgtccatcgacgtggagcggatctacttcggcggcaaggagcatcctgtgagaacaagatacggccctgtatccgtctccgtgtacggcgacgaagacaagccagcgctcataacgtacccggatgtagctctaaattacatgtcctgcttccaaggattgttcttctgcccagaggctgcgtccctgttgcttcacaatttttgtatttaccatattactcctcaaggccatgagttaggagcagctccaattccatcggatgtacctgagctatctgttgataatctcgcggatcaggtcgcggatgttcttgatttcttcggtttagggtctgtgatgtgcatgggtgtcaccgccggtgcctacgtgcttaccctctttgcagcaaagtacagggaaagggttcttggcctgatgttggtttcacctctatgcaaagccccatcttggagtgagtggttgtataacaaggtattgttaaacttactttattattgtggcactagtggactagtgaacgaatgcctccttcagcggtattttagcacggaagttcgtggtagtggacaagaacctgaatcagaaattgttcaggcctgtagaagtttacttgatcagaggcagggtgttaatgtatgtcgattccttaaagcaatcaacgggagacatgacttaactgaagcactgaagaagctccggtgccggacgctgatttttgtgggagagaactcacagttccatgctgacgctgtccacatgacaacaaaactagatcggagatactgcgctctagtcgaggttcaggcatgtgggtcgctggtcaccgaggagcagccacacgcaatgctgatcccgatggagtacttcttgatgggatacgggatgtacagaccgtcccagctcgacagcagcccccggagcaccctgaacccattctgcatatcgccggagctgctgtcgcccgagagcatgggggtgaagctgaagcctatcaagacccggacctccctcaacgtctaaacaacatgcggggggatcttggatggccggacgatacagctcgcaaaaaagcgaagactgcttggttgagctgatcggagcacggtcaccatcgcgagacaagttttgataccttccggtaccttggcacgcacgcacgcacgcattgcatagatggatacgctaatggcagcatttgctgtagtggattgctgtaagcctgtgatctacgtcttgagggataggcaaggaatgggaatagggtgaggttgtaggggaggaatacggctgtttgtttctttgttgatatgctttgtagtagtccacatcacatgtgtatatgtcatcagatcatcatttcacacgggaaagcaatatatatatatggtaaagcaaaaaaaaaaaaaaaaaaaaaaaaaaaaaaa

SEQ ID NO: 1989 - DNA, 1161 bp, Zea mays
gggagccaacgaaggcaaggcaagccagaccagcagcgggggagagaggaggcagaaggagattctagggagttaagggaggcgaccgccatgggggactccagcgactccgtgtcggtcgacgtcgagcggatcttctttggcggcaaggggcatcgagtgaggacgaggcacggccctctatcggtttctgtatacggagacgaggacaagcccgcgctcgtaacttatccggatttagccttgaatcacatgtcttgcttccaaggattgttcttctgtccagaggctgcgtcgctgttgcttcacaatttctgtgtgtaccacatcacacctcaagggcacgagttaggagcggctccaatttcagctgatgtgcatgtgccgtctgtcgatgaccttgcagatcaggtcgctgatgtcctcgattttttcagtttgggttcggtcatgtgcttgggtgtcaccgctggtgcctatgtgctcaccctctttgcgacgaagtatcgggagagggttcttggcctaatgttggtttcacctgtatgcaaagccccctcttggagcgagtggttgtacaataaggtattgttaaacttgctttattactatgggacgcgtgggatagtcaaggaaagtttgcttcagcggtatttcagcatggacgtccttggtaacggacaggatccagaatcagagattgtccaagcctgcagaagtttacttgacgataggcaggggactaatgtctggcggttccttcaggcaattaataggcgacatgatctaacagaatcgttggagaagcttcagtgccagacgctgatttttgttggggaaaactcacagttccatgctgacgctgtccacatgaccacaaagctagaccggagatactgcgccctagtcgaggttcaggcatgtggttcacttgtcacagaagagcaaccccatgcgatggtgatcccgatggagtacttccttatgggatacgggctttacaggccatcgcagcaggaaagcagcccccggagcacactgagcccgttctgcatctcgcccgagcttctgtcgccggagagcatgggagtgaagctgaagcccatcaagacgcgcatctcacgtaacgtttagtgtggggtggatctcggttggccatgg

SEQ ID NO: 1990 - DNA, 1711 bp, Triticum aestivum
cccgtcaaaacgggccaacaacgtgtggatctaaaaactagtctccggcttgtcccattccagtcaccaccggtaagctcaccgccgtcggtggccagtttatttctgggcagcggccccttcgcgtatatatgcacgcaatagacgccaaggggaaggcagggagagagaaagagaggccctgaaccggaagcaaggaagaggcgagcgacgacgacgaggaggaggaggttgttggtaggctgttgagaggaagcttctagaagctgccatgggggactcaagcgggtcggtgtccatcgacgtggagcggatctacttcggcggcaaggagcgtcctgtgagaacaagatacggctttgtatctgtttctgtatacggcgatgaagacaagccagcgctcataacgtaccccgatgtagctctaaattacatgtcctgcttccaaggattgttcttctgcccagaggcttcgtccctgttgcttcacaatttttgtatttaccatattactcctcaaggccatgagttgggagcggctccaattccatcggatgtacctgagctatctgttgataacctcgcggatcaggtcgcggatgttcttgatttcttcggtttggggtctgtgatgtgcatgggtgtcaccgccggtgcctacgtgcttaccctctttgcggcaaagtacagggaaagggttcttggcctgatgttggtttcacctctatgcaaagccccatcttggagtgagtggttgtataacaaggtattgttaaacttactttattattgtggcactagtggactagtgaacgaatgcttccttcagcggtattttagcacggaagttcgtggaagtggacaagaacctgaatcggaaattgtccaagcttgtagaagtttacttgatcagaggcagggtgttaatgtatgtcgattccttaaagcaatcaacgagagacatgacttaactgaagcactgaagaagctccggtgccggacgctgatttttgtgggcgagaactcacagttccatgcggacgctgtccacatgaccacaaaactagatcggagatattgcgctctagtcgaggttcaggcatgcgggtcgctcgtcaccgaggagcagccacatgcaatgctgatcccgatggagtacttcttgatgggatatgggatgtacagaccgtcccagctcgagagcagcccccggagcaccctgaacccgttctgcatatcgccggagctgctgtcgcccgagagcatgggggtgaagctgaagcccatcaagacccgggcctccctcattgtctaaacaacatgtggggggagatcttggatggcctgacgacacagctcgcaaaaaagcgaagactgcttggttgagctgatcggagcacggtcaccatcgcgagacaagttttgataccttccggtaccttggcacgcacgcattgcatagatcaagatcgatacgctaatggcagcatttgctgtagtggattgctgtaagcctgtaatctacgtcttctgggataggcaagcaagggggaatagggtgaggttgtaggggaggaatacggctgtttgtttctttgttgatatgctttgtagtagtccacatcacatgtgtatatgtcatcatcagatcatttcacacgggaaagcaatatatatatggtaaagcagaatcctgtctgttgtggagtcc

SEQ ID NO: 1991 - DNA, 1551 bp, Gossypium hirsutum
gccttttcttttaactacaaaacccatcttccatttgttatcattactgtagttcttttctcatattgttaagttggtattgctcagtttatatcctgtttgtataattgcctgcttaggccatgaagaatcttattgtcatgaataagagttctgttcttgtgtttttgcttgttgggttgtttgttttgtgtgaatgtgaagatgaagaccagttcttacctgtatctccaatggtgaagaaagaacaagaggcattatactcagctattcaaggatttgtggggaattcatggaatggctcggatctttacccagatccttgtggatggacacctatacagggagtttactgtgatctgctcgatgggtattggcatgtcactgttttaaatattggtctagtttttgacaactctcttcaatgtagcccaaatgcaaagttcacacatcacctgtttgagcttattcacttaagatcactctcattcttccattgtttttcctcgcctagagataaccccattagaatcccttcctcaaattgggaaagactctcaaacagcctagaatccttggagtttagatccaatggtggtctcattggtacaattccagtctccattagctaccttaaaaagctccgatcattagtgttactagaaaatggattaataggagacttgcctatagaattagggaacttggtgaatttaaagcaacttgtattggctggaaacaagtttactggtcaaatcccaccaagtttaggagggttaactgagttgttaataatggatttaagtagaaacagtctaacagggaccttgatgttgactttcgggtgtaatctcacttcattgctgaagttggacttaagcaacaacaagttggaaggaaagatacctgaagggattggaaggttaaagaatgcaacacttttggaccttggcagaaacaagttctcaggtgggttgatacagtcatttcaacaactggtttctttaaaagagatggtgatatcaaataatccgcttgggggtgatctcatgggtgttgaatggggaaagttgcagaatttggagatattggatctttcaagtatggggttaacaggtttagtaccagaatccatggcagggatgaaaaagttgagatatttggggctaaatgacaacagtctgacaggaaatctttcaccaaagcttgcaagtcttccttgtctgaatgctctttatgttaatgataataatctgacagggaagcttgagtttgcagaagggttttataagaaaatggggagaaagttcagagcttggaataattcaaatctttgctatcagcgtgaaatgatcccatcatcatcatcatcaagccatggtcttaatggggttaaactttgttaacaagaaacacaaaggagaaaaacagttctagtaaaacggattttagaggctttattttctcagttcaatttttagtggatatatttttaaaatttcaccatgtggatttcccccttaaattattaaattatctctttgccagtct

SEQ ID NO: 1992 - protein, 583 aa, Arachis hypogaea
MGSVSSEDGSDQQSDRCGSYSLSADVSESESCSSFCGRRFDADGGASSSANLSPRPVGGAAVPAGGHFHFPSQVMLPVIGGKDVVVWDHKPEKRDLDLSEVEMMKERFAKLLLGEDMSGGGKGVCTALAISNAITNLSATVFGELWRLEPLAPQKKAMWRREMEWLLCVSDSIVELVPSVQQFPGGGTYEVMATRPRSDLYINLPALKKLDGMLLGMLDGFQDTKFWYVDRGILLGDSKECDDAYSPGRGRTSVRQEEKWWLPSPKLPPNGLCEDDRKRLQQCRDCTNQILKAAMAINSSVLAEMEIPGAYIESLPKNGKACLGEIIYRYITADQFSPECLLDCLDLSSEHHTLDVANRIEAAVHVWRLKDHKKHLNTVKARRSWGGKVKGLVADGGGDKNHSLAQRADTLLQSLKHRFPGLPQTALDMAKIQYNKDVGQSILESYSRVMESLAFNIMARIDDVLYVDDSIKRCAAAESISLFNRGGFGGLPIQKRMTPSPFSIQHTPYASPPFATPSFCSSSPITGSPCSPRRMHTAKRNGPKDTTDSTKSEKAASAEFERVWSYTGNLSARRMSSDAPERD

SEQ ID NO: 1993 - protein, 530 aa, Hordeum vulgare
MAGGFAGVEAGAGRAEQYEGRITPYFILACIVGSFGGSLFGYDLGVSSGVTSMDDFLIKFFPDVYNRKHAHLHETDYCKYDNQVLTLFTSSLYFAGLVSTFGASYVTKRHGRRGSIMVGAVSFFLGGAVNAAAMNVAMLIVGRVLLGIGIGFGNQAVPLYLSEIAPCKIRGAVNQLFQLTTCLGILVANVINYFTDRIHPWGWRLSLGLAMGPATAIFVGALFLPETPNSLVERGRLDEARRVLEKVRGTHKVDAEFEDLKEASEAARAVRGTFRNLLAVRNRPQLILGALGIPAFQQLSGMNSILFYSPVIFQSLGFGSSAALYSSIITGSMLVVGALVSMVVVDRLGRRVLFMEAGVQMIVSMVVVATILALKFGHGEELSKGVSTVLVVAICMFVVAYGWSWGPLGWLVPSELFPLEMRSAGQSVVVCVNLFWTAAVAQCFLAAMCHLRWGVFILFAALIVVMSIFVILLLPETKQVPIEEIWLLFDKHWYWKRIVTKDPKYQGHHQRQEIAAAAAVKPVATSESDA

SEQ ID NO: 1994 - protein, 226 aa, Phaseolus vulgaris
MAAATITCKLSLLLSLFSVWFLGVTSASLPPSCQRIECPSYDLIQLGNGYEIRRYNSSVWIANTPIQDISLVEATRTGFRRLFDYIQGKNNLKQKIEMTAPVISEVLPSDGPFCESSFVVGFYVPKVNQANPPTPTEKDLKIKRWKTVHVAVRQFGGFVKDTSVGEEAAALQASIAGTKWGAAVEKSKRAGYSVYTVAQYNAPFEYDNRVNEIWFFFDIEDALRSM

SEQ ID NO: 1995 - protein, 225 aa, Brachypodium distachyon
MESDCQFLLAPPMYGDGQFLQQQLMGGSGEIRKRRFTDEQVRSLESTFHSRRAKLEPREKAELARELGLQPRQVAIWFQNKRARWRSKQLEHDFADLRAHYDDLHARVESLKQEKLTLAAQLEELKEKLSERQDQSGSSDDGAEHEVDHDKDVRDNKVSCVVEEEEAEGAAPVVDVVSDESAVGWYEYERLAYGGGAAAALPEPFCATPELWETTWPLVEWNAVA

SEQ ID NO: 1996 - protein, 448 aa, Gossypium hirsutum
MKMNRVVVLLLLLWFLCFSSVFWMTSASVVLIGNNVTLSFDDIEANFAPAIKGSGECGVLYLANPLDACSDLSIKVDELSNGSSPFALVIRGGCSFEEKVRRVQKAGFEAAIVYDNDDDGVLVAMAGNAAGIKIHAVFVSKASGEILKKFAGSTDMELWLIPSFENSAWSIMAISFISLLAMSAVLATCFFVRRHRIRRELPQSSRVREFHGMSRRLVKAMPSLIFTAVLEDNCTSITCAICLEDYTVGEKLRILPCRHKFHAFCVDSWLTTWRTFCPVCKRDARTSTGDPPASESTPLLSSTLSTMSSSALSSVRSSLASSSAIQIAPALSRSPSIAHTLSLASNPYIQQSLRSYRQSPMSFSRSSVDLRNASSQRSRASHLVSPASLNYPSISPLNARYISPYFPSPSNASPSIVSSSGHLLHPLHYSESATSFSPFASAQSLPDC

SEQ ID NO: 1997 - protein, 340 aa, Gossypium hirsutum
  Sequence also found in Organisms: Gossypium raimondii
MGEMSSFQLGVIGALFLSVASSVSIVICNKALMSNLGFPFATTLTSWHLMVTFCTLHAAQRFNLFENKSIDIKTVMLFGILNGVSIGFLNLSLGFNSIGFYQMTKLAIIPFTVLLETVFLKKQFSQKIKLSLFLLLVGVGIASITDLQLNFVGTILSLLAIATTCVGQILTNTIQKRLNVSSTQLLYQSAPFQAAILFVSGPLVDQFLTNQNVFAYKYSPIVLAFIVLSCIISVSVNFSTFLVIGKTSPVTYQVLGHLKTCLVLAFGYTLLHDPFTDRNILGILIAIFGMGLYSYFCTQENKKKQADPLECQMKDKEDKPFLAHEKEGHEVKSSDKNSIV

SEQ ID NO: 1998 - protein, 899 aa, Setaria italica
MDAEEASPPPQPPPWAQNKSAAAIDSSSAPLAAAAARLSARSRALPSSRDFHFYNNFPAFKSPVGAAAAKADASLGVLGAAPLLPARQQPFPGGGDLDDAHDWLVALNDDLLERFGASVDEFKALREKEEASGRRAASEAGDGDGFQVVYGKKKKKVGDGEEGVERAEAFGASSSVKMAKDKAAAPGMKAKVPFHIRTIPRPQGVYRIVVDNSTKPFEHALLERSEDGTRPVHPLEKLPIEQLINRNVPDSEPVKPPALDDTPFTFVEDLKTLEVLATKLKNATEFAVDLEHNHYRTFQGLTCLMQISTRTEDFIVDTLKLRRYLGDYLREFFRDPTKRKVMHGAGRDIIWLQRDFSIYVCNLFDTGQASKVLQMDRNSLEHLLHHFCGVTANKEYQAADWRLRPLPDEMIKYAREDTHYLLYIYDLMRLRLVKESSADSDMLLEVCKRSNEICLQLYEKEQLTDSSYLHLHGLKENELDARQLSVLSSLYRWRDGIARAEDESTGYILPNKSLLEIAKEMPVTSGKLKRIVKSKNFERHLSTVINTIRDAISASGAFESVAEQLKKGKLEELTMANVKNSSEDTEMIPAVDVDNNEDPSDESAVVSTVITNVGTASPCMGTVTSEASFGNMHLEDFTPEKNSGTSSGFTGLADKEILSNGQQQVAKATVQVSKRTTAFGALFGKPAAGRRPNLFPGLSSDQGKSKVDKITSSVVLPFHNFSGSVKPPSGSIPLKEQVHSEPESVQHSDPACQMEDVIQLDTETDDPQPPESRNDDEHQEPKVMEMSKSPSDAPSDTEQRFRSLNEERNVHQNQKIPQEPEFRFPVVPFDYAEARENLVCGEPKAETKKDNAVARPINTDSGDKRRTSNKPGAGEEGNFQHPRRRQAFPPSGNRNFTYH

SEQ ID NO: 1999 - protein, 244 aa, Setaria italica
MQGDPGYGGYGYGYGYGAGGYDNDMAGYGAYYTANDRYPAAPAAYEDPLAGRRQHDFPAPLTGLEFQASDTCPKNYVIFDQTYDRSRVMFHPSLANNFGGGYDYDHRCYGYDQAYASKTAYDEDAGGGAASVRQKEDTEEIDALMSTEDGEDEDDVLSTGRTPGCRAGGSPDSTCSSGYGGGGRKQETGGEKKKERMKKMVRTLKGIIPGGDRMDTPAVLDEAVRYLKSLKVEVKKLGARGSSS

SEQ ID NO: 2000 - protein, 430 aa, Setaria italica
MDPHGSSIIASFVSFLFLLVVSSSAVIPASAGAGGSSSNGTAVPFRSADELLRFQRIKAQLARTRDASVKTIQSPDGDVIDCVPTHLQPAFEHPKLRGHKPEKEPAERPRSSGRADADGDQDDEEALPQAWRRSGESCPEGTIPVRRTTEADMLRASSVSRFGMKARGGGFTRRDSTAGGHEHAVGYVSGGQFYGAKASLNVWPAQVASPAEFSLSQIWVISGAFGNDLNTIEAGWQVSPQLYGDNNPRFFTYWTDDAYQETGCYNLHCSGFVQTSSRVAIGAAISPISSSGGRQFDITLLIWKDPRRGHWWLQLGSGALVGYWPSSLFTHLGTRAGMVQFGGEVVNARPAGAPHTATQMGSGRFPGEGYARAAYFRSVQVVDWDNSLVPAAGLRLLADRPGCYDIAGGSGGAWGTYFYYGGPGRNARCP

SEQ ID NO: 2001 - protein, 687 aa, Setaria italica
MSGHRIPAAARLGGITSRRHAELLLHSGVGDVSVKDLRLRRVVPPASGSLDSSPVCAAPVKPGSVESTPPEAASAVAVAEDLDRKPVLPRSKLVRDPGSFGYRRLLPFLNEMAKNDSSIGRSDSPLVDAPLGEIRCESDAMDSVEPVVAKTGGDPEVKDGCNNVTEEANTVPHDLASSKPWLARCTRSRFVRHPSSFSYKRMLPFLMENEISSQEGERVKIRRVADERILASDENGVSASGQQHLAVSDDSSQECNRAQVDRMEEEETPKADENHVLDDRQPQPAVTKASPPECNAAEGQNVMQQEALTTSQDPLTSSEGDLTSDGDVVQASGHHHIVVSEDSPEECQRDEVKRSVQDEAVKSDWSHVLDSREFQPAVSEVFPSKNSVAEVQKATQEESLPSDGDEENSNKGDHLAKEQPQPCVTKESLTAQPHDSAEITEVPQCQNKDAGSHDAGFVSPTKTVIPLLHRHCAQPEDSVTSVDDQLCDSDVQMICRPSDPCAVDRSLSVEEMSGCIPLTESGCKAGISRPRGLHSTEKRGFSPKKLSPKKGILKKHTRGCKGICMCLDCCTFRLRADRAFEFSRKQMQEADDIICNLLKEVASLRSLVEKPAGQQESTQAACKRASQVEEVARERCRQMFVDLNSHCRIPGPRVRFAQYVEEKKASPSPREKKASPSPRSSSSSSWR

SEQ ID NO: 2002 - protein, 137 aa, Zea mays
MEAQDDCKWRQIPAFGDWNVWDGDMPVTQYFQAGAFFFAAPAEKGDADLFKVPQLPAKPYGYKKCVVRVKGEKETAVPPAARKGRRRRCVSEQHKWKPKGAVDEDLYKISPQLLCKVKKKKLLRNLLGGCLGLGCIA

SEQ ID NO: 2003 - protein, 82 aa, Zea mays
MAPSYRPYHVAGEDQQRKVKAGGKWLAAWSVLGVGGDPAEMKRRRRVASYKAYAVEGKVKASIRRGIRWVKAKCDRIAAIHN

SEQ ID NO: 2004 - protein, 77 aa, Zea mays
MPGEKLRSTCVDLPQARDVGMDGLGHGVPLPVRVSPRCRNPDVDRSRLNLVADEQATEDSEVQLVETAEQELVEGEE

SEQ ID NO: 2005 - protein, 341 aa, Zea mays
MAPPDAGAAAACGARWVRRDTLLGLALGQFVSLLITATGFASSELARRGINAPTSQSLLNYVLLAVAYGGVLLYRRQPLTIKWYYYLILGIIDVEANYIVVKSYQYTSLTSVMLLDCWSIPCVILLTWVFLKTKYGARKFLGVGVCVLGLILVVFSDVHASDRAKGPNPLKGDLFVILGSMLYACSNVTEEFVIKKSNRVELMAMLGLFGALISAIQISVLEREELHSITWTSGAVLPFLGFAVAMFLFYSAVPVILKLCGATMLNLSLLTSDMWAVLIRIFAYHEKVDWIYFVAFAATAGGIVLYSYKGSNEVEETAQVAGASDEHGKGRDEEAGTRNPA

SEQ ID NO: 2006 - protein, 192 aa, Zea mays
MAKARRSPFAAAERFLGFPRGGPSPGAVAPAPAAFDDLPDLAEADVWYSAAAAAATNDPGSPRATASRQVEAAEGRRGPRQGGLSRAFGDGPGRQAAASAPVEVPAWPARFAFPDADPSLLFEMEMGGDDHDEGREGDDGRQGQGAGWVPPHVYLARRQARASVVEGAGRTLKGRDMSRVRDAVWSRTGFDG

SEQ ID NO: 2007 - protein, 545 aa, Oryza sativa
MAPPPAAAAALAACILAVAATLAGADDPYRFFTWNVTYGSINPLGSTPQQGILINGQFPGPRIDCVTNDNIIVNVFNNLDEPFLLTWNGIKQRKNSWQDGVLGTNCPIPPGANYTYKFQAKDQIGTFVYFPSVAMHRAAGGFGALNVYQRPAIPVPYPPPAGDFTLLVGDWYKAGHKQLRQALDAGGGGALPPPDALLINGMPSAAAFVGDQGRTYLFRVSNVGVKTSVNVRIQGHSLRLVEVEGTHPVQNVYDSLDVHVGQSVAFLVTLDKAAQDYAVVASARFSPGASPLMATGTLHYSSAVSRAPGPLPAPPPEQAEWSMNQARSFRWNLTASAARPNPQGSFHYGTIATSRTLVLANSAPVLAGQRRYAVNGVSFVVPDTPLKLVDNYNIANVIGWDSVPARPDGAAPRSGTPVVRLNLHEFIEVVFQNTENELQSWHLDGYDFWVVGYGNGQWTENQRTTYNLVDAQARHTVQVYPNGWSAILVSLDNQGMWNLRSANWDRQYLGQQLYMRVWTPQQSFSNEYSIPTNAILCGRAAGLGH

SEQ ID NO: 2008 - protein, 842 aa, Oryza sativa
MEALGDMEGEEGQRRQQQIRVVRCPKCEKFLPELPNYSVYVCGGCGATLQAKKNSASENSSEKSDGGHVKYLEVLESSPDNKGAASKDTCEAAQEGEAKNGEAKAEERQVLLDRMAACDDSRIPREPNALKLEASLRDDSREIREAKYRRIRSEDKGEAKHTVRARDRSPRSVVDAIPPNAYPAEGPSDYHIKSRFRHTNGEQADMRNLEGLNRVNGLEKDRADLLRMLDELRDQVQRSCEITNKPSGSTSTDKAVDASGLYNPRERLSRLRHGSPQLQRSGSQQSPSLNGQAPCIPQAYAPGTAQQDLHGYGEPMAHMGAPSYPVGTYPWRNFDNYFYGQYDPDPLISYHHDGFYHQPACSCLHCYHREFLPVQGPPLGFNHRRVPPYVMNNPRVYPVDGPAMFGTQNYNSRVNASMQRNHMRAAMSKKPAQTCEPIACGAPFTICYNCYEVLQLPKKSPVPGKDEYKLRCGSCSHALVVKLDGSRLDVSAPSPISHISGGSKISSNDGQGSNANSAPHERVLPLYSFSAASHGSQDLPSNSSEAEKMQGISSSCSISEDENSPARSNSQRDTPGSRDLHPEAEVSTRVPSLHLRDHFGYSPSEKVVDGSGKGSRSTRSEHEKAVLTESFKQNTVKDVSVVNIMDLSDDEYDDPDYMQDRGDVAQPVDHPRAVKTGDSFFTNLIKKSFKINNGMGNGRAKVFINGYPISDRAVRKAEKIAGPIYPGEYWYDYRAGFWGVMGQSCLGMIPPYIPELNYPMPKKCAAGNTGVFVNGRELHQKDLDLLVGRGLPDSPGRSYRVEMSGKVSDEVSGEELYCLGKLAPTVEKMKRGFGMRVPRIIP

SEQ ID NO: 2009 - protein, 256 aa, Sorghum bicolor
MDEWVRQAEVWVRQAESWIRQQPPEQIYIAAVVVALTILLLILASCLKSSKLNTIVLSGLSGSGKTTIFYQLRDGSSHQGTVTSMEENNDTFVLHSEQERKGKVKPVHVVDVPGHSRLKPKLDEVLPKAAGVVFVVDAQDFLSSMQAAAEYLYDILTKATVVKKKVPVLIFCNKTDKVTAHSKEFIKKQLEKEINKLRESRNAISSADISDEVQLGVPGEVFNFSHCQNKVAVAEGAGSTGNVSAVEQFIREHVKA

SEQ ID NO: 2010 - protein, 495 aa, Sorghum bicolor
MAPFQMRFGLQISPARSDEEEEEDEEEEDEELEEEEEYDEMESEGTASPPMMLRAGRGGGGGGGGGGGGGLVGAVVGALRRSLVMCSAGAVGVDDDDDDDDEDSEGEGIEIGRPTDVRHVSHVTFDRFGGFLGLPADLEPDVPRRTPSASVSVFGVSPTSLQCSYDQRGNSVPTILLMMQRKLYAHEGLKIEGIFRINAENSQEVYVRDQLNSGMVPDEVDLHCLAGLIKAWFRELPSGVLDALTPEQVMHCNTEEECALLASMLPPVEATLLDWAINLMADVVEQENYNKMNARNIAMVFAPNMTQMADPLTALIHAVQVMNFLKTLIMKTLKERKEKNGALQASQSCSGSPNDQDEHQMPEHLEKPLVLSSQKDFDFPMIDRDTPVQVLGAEKALHHDSQIHSDETKKFGIGMDHKKSQSDVSSLGSDSNNRFNSSGREFGSRNGEGLFDRFSFRKGVERLCRHPVFQLSRSMKKSADVVVFDAPREARQAWV

SEQ ID NO: 2011 - protein, 327 aa, Sorghum bicolor
MASKAPPDLLNATSSIHMIVRQLFSRMVFSLQMECSLSMEIISFWLWLEGNGHPDFLASVESFDNYNLRGIAVAGKMFIEALRRKSSHFNHRSEEEGYFQKEATEGILFYLNNFCYKALEDILEIAEAKERIYRNNHQQVQQQNMKGKAPIMSTKDLLSKIRASFTGNPSHEEGSSSRSMPSPKNQILRDIENPIDQCLSTYPLATLFDSLNLRDDPQADAIQLQIQVQRQPSIPRDERTLFVTFSNGYPFTADELFEFFEGNFGSVEIISVEEPVEPRPPLYAHICFFTQETILHILRGNPRVKFVIRGKHLWARQFVPKRKKVRN

SEQ ID NO: 2012 - protein, 349 aa, Glycine max
MWSTQARSINYPEMGMFVVAPASSFHHHHHHQPPQHDPSVMADSLNPATALGVGVGVIPLLAATPCLESDNNILGSRTRGGGGIQLWQDQQQHHQSHYMKKQLQQGLLDHNSNTSSGNLIQNSGEVTASGTSSGGTTCQDCGNQAKKDCTNRRCRTCCKSRGFDCPTHVKSTWVPAARRRERQLMTSATAAVAGSSGSTSGTKKPRLIASQTTTTSHTSTSNTTPPRSFDTSSSHQDAGFKESLPGQVRAPAVFKCVRVTAVEDGQDEYAYQAVVKIGGHVFKGFLYDQGVENRDVYPNLSELHLGGGSGGAGRNGVSSSSPMMDPNDVYAASGGGLLGGSSAYGNPMN

SEQ ID NO: 2013 - protein, 438 aa, Glycine max
MSGKQAARPRTRVGKYELGKTIGEGSFAKVKFAKNVENGNHVAIKILDRNHVLRHKMMEQLKKEISAMKMINHPNVVKIYEVMASKTKIYIVLELVNGGELFNKIAKNGKLKEDEARRYFHQLINAVDYCHSRGVYHRDLKPENLLLDSNGVLKVTDFGLSTYAQQEDELLRTACGTPNYVAPEVLNDRGYVGSTSDIWSCGVILFVLMAGYLPFDEPNHAALYKKIGRAQFTCPSWFSPEAKKLLKLILDPNPLTRIKVPELLEDEWFKKGYKQATFIMEEDINVDDVAAAFNDSKENLVTERKEKPVSMNAFELISRSQSFNLENLFEKQQGSVKRETHFTSQRPANEIMSKIEEAAKPLGFNVHKRNYKMKLQGDKSGRKGHLSVATEVFEVAPSLHMVELRKTGGDTLEFHKFYKNFSSSSGLQDVVWHSEEKQ

SEQ ID NO: 2014 - protein, 447 aa, Solanum lycopersicum
MIEPKKQSKNRGFYVRMKLLNHNNGGSRNRGLFCYRYFKWVLWFSLSFYFFASFLFNHKPNTISKTTVPQYSKASRALIEYPETQHHRDSLNGLKIYVYDLPSKYNIDWLSNERCSNHLFASEVAIHKALLNSDVRTLNPYEADFFFVPVYVSCNFSTVNGFPAIGHARSLISSAIKLISSEFNFWNRSSGSDHIFVASHDFGSCFHTLEDVAMADGVPEFLRKSIILQTFGVKYDHPCQKAEHIVIPPYISPESVRKTLATSDVNGRRDIFAFFRGKMEVHPKNVSGRFYSKKVRTVILKKYGSDRRFYLKRNRFIGYQSEILRSTFCLCPLGWAPWSPRLVESVVLGCVPVIIADGIDLPFSSAVPWSEISVTVAEKDVGKLGTILENVAATNLSTIQQKLWDPRISRALLFHDRTVEGDATWQVLHALTEKLSRSHHRSRVSNE

SEQ ID NO: 2015 - protein, 371 aa, Solanum lycopersicum
MKSSIKVLLLLVLLCAISNISIAVIDGLLKNGNFEMPPSKADLNGTEVLKHNAIPEWSISGFVEYIKAGQKQGDMLLVVPEGYAAVRLGNEASIKQILNVTKGMYYSLTFSAARTCAQEERINVSVTPDFGVLPIQTLYSSSGWDSYAWAFQAEFPQVEILLHNPGVEEDPACGPLIDSIAIRTLYPPRATNQNLLKNGDFEEGPYVFPNTSWGVLVPPNIEDDHSPLPAWMVESLKAVKYLDSDHFSVPHGKRAIELVAGKESAIAQVARTTIGKMYQLSFKVGDASNACEGSMIVEAFAGRDTLKVPYESMGKGGYKRAILRFKATASRTRIMFLSTYYHTRSDDFVSLCGPVVDDVTLLSVRTHRRVL

SEQ ID NO: 2016 - protein, 678 aa, Solanum lycopersicum
MGFPPLFLCFLFILFSLSVSGNAELQALMDLKASLDPANALLTSWTVSGNPCDGSFEGIACNEKGQVANISLQGKGLKGKLSPAIAGLTHLTGLYLHYNSLYGEIPREISNLVELSDLYLNVNDLSGEIPQELGNMSNLQVLQLCYNHFTGSIPTQLGTLTKLNVLALQSNQLTGAIPASLGDLGVLMRVDLSYNSLFGSIPSKLADAPLLEVLDIRNNKISGNVPLALKRLVGGFQYENNPGLCGVGFPSLRVCTSFDRSNPNRPEPYGVGSSGLSTRDIPETANLNLNCSGNACTTSSKTSQASVVVGVIVVTIIASAIGILSFTHYRRRKQKLGGGLEMCDSRLSIDQAKEVNRKNGSPLVSLEYSIGWDPLAEGRRYGGVSQEILQRYRFNLEEVESATQYFADKNLLAKSNFSTTYRGTLRDGSLVAVTRIAKISCKSEEAEFLRGLNVLTSLRHDNLVRLRGFCCSKSRGECFLVYDFVPRGNLLHYLDLKEDEARALEWSTRVSIISGTAKGVEYLHGCKVNKPALVHQNICAENVLLDQRFKPLLSNSGLHKLLTNDTVFSALKASAAMGYLAPEYSTTGRFTERSDIYAFGVLIFQILSGKRKFTSSMRSAAESSKFHDLMDVNLHGRFSESEATKLAKIALLCTHECPEERPTMETIVREIGNLASPS

SEQ ID NO: 2017 - protein, 306 aa, Triticum aestivum
MEAAASNPSSKRIALVTGGNKGVGLETCRQLASKGLKVVLTARNEARGLEAVEGVRRSGADVVFHQLDVTDPDSVARLADFVRDQFGKLDILINNAGISGVDRDPVLVAKVKEQVESMDVDQRVQWMKENSKETYEEAKECMRTNYYGAKLVTEALLPLLQLSSSGRIVNVSSGFSLLRNFNSEELKNEFNDVDNLTEKRLEELLDSFLEDFKANLIEAHGWPTGGSSAYKVAKAALNAYTRILAKKYPRMRINCLTPGYVKSDMSMHMGVLTPEEGASNPVKVALLPDDGPTGAYFDRDGVASFV

SEQ ID NO: 2018 - protein, 473 aa, Triticum aestivum
MAASSAPLAFSASASALSARLRLAAPAASCAATTRRRRPVVVRAKIREIFMPALSSTMTEGKIVSWAAAEGDRVAKGDAVVVVESDKADMDVETFYDGIVAVVLVPAGESAPVGAPIALLAESEEDVALAVAQAQALSSKQPQQQAPAPSDAAASPPPPAAPVAAAPAPVAAGTKGVATPQAKKLAKQHRVDLAKVTGTGQFGRITPADVEAAAGIQPKPKVAPTPAAAPVAAASSVRAVPQAAVLPPVPGATVVPFTAMQAAVSKNMVESLSVPAFRVGYPILTDKLDALYEKVKPKGVTMTVLLAKAAAMALAQHPVVNASCRDGTSFTYNSSINIAVAVSIDGGLITPVLEQADKLDIYLLSQKWKELVKKARAKQLQPNEYNSGTFTLSNLGMFGVDRFDAILPPGQGAIMAVGASKPTVAADKDGFFSVKSKMMVNVTADHRIVYGADLAAFLQTFAKIIEDPESLTL

SEQ ID NO: 2019 - protein, 268 aa, Aegilops tauschii
  Sequence also found in Organisms: Triticum aestivum
MAQLPPKIPTAATGAHHWPGAGVEHHGHGPAAVWADEFAEFAAARRGAHRRSLSDSVAFVEMAPGGCGGAGDFDRLDDDQLMSMFPDEGGSTAPGSENGTSDSDGDKHGKDRYDDGHNDDANPEEPGPGQATPTSSTETIRDPKRVKRILANRQSAQRSRVRKLQYISELERCVTTLQNEVSVLSPRVAFLDQQRTILTVGNSHLKQRIAALAQDKLFKDAHQEALKEEIERLRQVYQQQNLRMSSGAGAASDHGGPPPVRAEKELMS

SEQ ID NO: 2020 - protein, 364 aa, Arabidopsis thaliana
MATDEMKSETKKTEHKQKQSTQIKQDLPPPTIPPLPLPYKSCTLKVSIHCEGCKRKVKKILTSIEGVFKVDIDVKQHKVTVIGIISPEILLKKLNKAGKNAEQLPEIPDPVDNKPKPVDPKEKNKKKKKEEKVQITNEATSSGIDNPEKPGSGECDKPESEKPVDEKCLSGDGGETSGPVKEEKKDVLKEKDSGKEESPSPPADSSAPAAEKKAEDTGGAVPDNGKVGKKKKKKGQSLATTNNPTDGPARTQSLPPPTATDYDRPINQINDHHITTTNNPPRHDLYPYPAQGYYAPQVMYGVSYNVAQPPVSVDAASYYTPPPPYSYAYMHNGYQPSDQNPCQPRPSDSFELFSDENPNGCAIM

SEQ ID NO: 2021 - protein, 492 aa, Hordeum vulgare
MDQPPNGFAAGGLFVQHIDGQNASPPSVIVIGGGISGIASARALSNASFKVTLLESRERLGGRVHTDYSFGCPIDMGASWLHGVCNENSLAPLIRLLGLRLYRTSGDNSVLYDHDLESYALFDKDGRQIPQEIVTKVGEIFEQILKETVKVRDEYANDMPLVQAISMVLDRNPHLKLEGLQYEVLQWCICRLEAWFATDVDNISLKNWDQEHVLTGGHGLMVNGYDPVIKALSRDLDVHLNHRVTKIIQRYNKVIVCVEDGTSFVADAAIITVPLGVLKANIIKFEPELPDWKLSAISDLGVGLENKIALRFNTIFWPNVEVLGRVAQTSNACGYFLNLHKATGHPVLVCMVAGRFAYEMEKLSDEESVNFVMSQLRRMLPGATEPVQYLVSRWGTDPNSLGSYSCDLVGKPADLYERFCAPVGNMFFAGEAACIDHSGSVHGAYSSGIDAAEDCRRRLSTQLGISDLFQVGKIVMREEMTEVMVPLQISRL

SEQ ID NO: 2022 - protein, 306 aa, Setaria italica
MANFSSHHSALLLKMPAALTNGHSPNLSSLLFYGQNHGQGAPANANAASGTAAAMAEDASLESSSAVVDTSPQGSASPMDRKRKATEDSATLSSAHSKDCKQEGKSKRGKRPHKEAEEKSTTDDEAPKGYIHVRARRGQATDSHSLAERVRRERISERMRMLQALVPGCDKVTGKALILDEIINYVQSLQNQVEFLSMRIASMSPVLYGFGLDSDGLHDHAQKMGGMIQEALAMPGPVLSQASPTPSQTIMDTTTTSSTPYSLQGQGAISFSQDNGSNYLMQQAVGEPTRQELLNQLVFNNMCSFQ

SEQ ID NO: 2023 - protein, 56 aa, Eragrostis curvula
  Sequence also found in Organisms: Pennisetum glaucum, Saccharum officinarum, Setaria italica
MGHSNVWNSHPKNYGPGSRVCRVCANPHGLIRKYGLMCCRQCFRSNAKDIGFIKYR

SEQ ID NO: 2024 - protein, 649 aa, Setaria italica
MPRRPPLRVAAAALLLCCILCLRLASAEPDADKAALLAFLAGVGRGGAARARINWPTTPLACAGPGWTGVTCSADATRVVALHLPGLGLSGAVPSGTLGRLDALQLLSLRANNLSGRFPTDLLSLPALTGLHLQRNAFSGALPAGLAALQNLQVLDLSYNRFEGGLPGALSNLTHLVALNLSNNSLAGRVPDLGLPALQFLNLSNNHLDGPLPGSLLRFADAAFAGNNVTRPAAPVPPPALLPPSTLAPPSTKRRVRLSEAAILAIAVGGCVLVFAVVAVSLIAFCNRDGGEEMGGGAVSGKGGDKMGRESPESKAVIGKAGDGNRMVFFEGPSLAFDLEDLLRASAEVLGKGAFGTAYRAVLEDATTVVVKRLKEVNAGRREFEQQMELVGRIRHDNVVELRAYYYSKDEKLLVYDYYSRGSVSNMLHGKRGEDRTPLDWETRLKIALGAARGIAHIHTENNGKFVHGNIKASNVFINRHDFGCISDLGLAQLMNPITARSRSLGYCAPEVTDTRKASQASDVYSFGVFILELLTGKSPVQITGGGNEFVHLVRWVQSVVREEWTAEVFDGELLRYPNIEEEMVEMLQIAMACVSRTPERRPRMADVVRTIEEVRRGDTGTRPSTEASTPAVEAAAQTRAESSSSAAQ

SEQ ID NO: 2025 - protein, 1020 aa, Zea mays
MSSRLKDRGGGRATAAATRPLTPKPFSISSSARQTTAAAGKENTASKPSKPTSAVRWSTSSLPRASRIQSSVDSSKLASTLRAPVLPGRTSISKDPVVEAGLRRSVSGGIRASSVEKGRRSISVVGSRASEARRGSAGAGSDDTGRRARFDAKAKGSDEISRKRGDLDAKGKQTDEIGRKRESFDAKAKQIGGKRDSFCVNVLKQCDENKGKTNAFVTNMKKQCEDVGGQIKGSDSKVKAAEEINMKKEGPNKLMKEMNTKKADPGEAASKSVECCAIQKDDDIGKTSVIPVFTVHVVNSNDVPDPIRKQQKNNEEGRKQEEKVKLADRIGVFEKVAAGGEGGSAKPVSAMNRYPSKLHEKLAALEGRVQKIATDIKKTKEMLDENNPNEPKQILSNIQKEITAIEKAISHVKDDNKIQLGTADSSECESSHPETAEKCTITKPGNLKQAGKGLNADELEARFFPHHKLLRGRISSTSTQQELSVDAKKDCSGKTRPAASDPGDDENSIAMEFLASLDGEENDFFKDRRAKKLEKNKICEVADATSKTSSQGSTKNPVAPNHKDEVELLATEELEEFDDQENKSSMMLQEETEESCNSQLSGIGNKSSTGGWFVSEGEAVLLAHGDGTCSYYDIANHEFKSEYKPPSLVSNNTWGDCWLIRAPGVDGCSGRFVVAASAGNALEPGFCSWDYYTREVKSFHVEEEASQTFAPTSRAILGALSNVGSSRSSSALSNTERQQWWYKPCGPLLLSTASKQKMVTAYDIRDGDVVMKWEVSNLVMGMEYSSPLQWRSRGKVVIAGSESIGLWDVNSLNPQPLLSVASGKKVYCLHVNNTDAEVGGGVRQRVSSSEVEGNDGVFSTQESVNVFDFRVPAGIGLKIARHGGTANSIFSRGDSVFIGSTEGRLQIKGGSRSRVQQYSLRKGKLVATYELPEFNAHIHHSAITQVWGDSNLVLAACGMGLFAFDTFKEDTQPTYSFDRGNTIAAREAIGPDDLYCPTFDYSSSRVLLVSRDRPAHWRYL

SEQ ID NO: 2026 - protein, 375 aa, Zea mays
MGAEAAHGHPQQQPPSSLRPGREAAAPPAVVGLQLSALIDHVARVDWSLLDRVPGDRGGSQQVSIDELNHILDEVNAHILPSRNDLTPVTTIAGGSVANTIRGLSAGFGISTGIIGACGDDNQGLLFVNNMSFSGVDLTRLRAKKGHTAQCVCLVDASGNRTMRPCLSSAVKIQANEFRKEDFKGSKWLIVRYAQQNMEQIVEAIRIAKQEGLSVSLDLASFEMVRDSRSKLVNLLETGNIDLCFANEDEAREVIGGSLESDPEEALAFLGKYCKWAVVTLASKGCMAKHGKQVVRVPAIGESNAVDTTGAGDLFASGFLYGLVKGLPLEECCKVGACSGGSVTRALGGEVRPENWQWMYKQMHARGLLLPELKN

SEQ ID NO: 2027 - protein, 740 aa, Zea mays
MQPPRRALVTSLLRLRSFSSIAYPHPYPPAPLRRHQFVADPTTSTNRGIVGGIGGVGSGNGNLLDPTQLLRDDPVAITASLWVSSFRAAASTSSSCTPTPPQPLTPFLSRLELWVLAYQKAYADETGSYLPRSSIPASTLASLLTLRNAVLDGRFRFGNRLTPILQSPRAANAPDPATLSKRKLRALLTTPGPSPFQDRVVQELLLLLLEPVYEARFSPKSFAFRPGRSPHAAIRTIRRSFAPYLWYIKGDLSPLLHSPDPALVVGALIRDVRDKKVVDLIRSALLTSVVTASDDAAVKKKKTKRKYQKKKVLPEGEPKPDPYWLQTFFGFAPEEAQTQPDWGHCGVLSPLLANVCLDEFDKWMEERIKEFYKPSKSDVVGGDDGIEQGNTSWPEFVPTTGPDKTRKVDYIRYGGHFLIGVRGPRADVAVLRKQLVEFCDQRFRIKLDNESLPIEHITKGVMFLDHVLCRRVVYPTLRYTATGGKIISEKGVGTLLSVTASLKQCIKQFRKLEFLKGDREPDPQPCFRMFHATQSHTNSQMNKLLLTMAEWYRYADNRKKVVNFCSYIIRGSLAKLYAAKYKLRSRAKVYKIASRNLSRPLKDKKGQSPEYHNLLRMGLVDSIDGLQYTRMSMVPDPDYTPLPFGWRPDHEKILLEYIKLTDQQTLKEQRNCTREDGLITPQDNISMLVWGYKKNAVLLPSKVSDAQGSTEDLGSDTDELNEKELGNEGNQSFQKLAEMS

SEQ ID NO: 2028 - protein, 224 aa, Zea mays
METVVGDLMATELRLGLPGTVDDCSQHQQQTQLKVAAPPSNPTRGKKRPAAEEEEANKRDAEAAPPAAKAPVVGWPPVRSYRKSCFQQAKQQAVSSSSKAADKEDAAAPAPSCTASAAASNATASAGAGSFVKVSMDGAPYLRKLDLRMYKGYRELREALEAMFVSSGSANNNNNLSEFAVTYQDKDGDLMLVGDVPFEMFASTCRKLRIMKRSEATGLGSARQ

SEQ ID NO: 2029 - protein, 499 aa, Physcomitrella patens
MATKQSGGARLSPPVSTELSLRSEEDRNLLLDSSSSKEIVEQELPVAWYKQCQHGRWHSYAGAAFCLVVALVICVPFLSYEVFSRWASRGLHPWGTSRPLQKLDKPVVILVSSDGFRFGYNWKAATPNIDRLRMEGTEADPGMIPVFPSKTFPNHYSIATGLYPAYHGIVGNYFRDPNPGSNDTFKPGELDPKWWLGEPIWETVVNQGLQAATYFWPGSQVKKGNWTCESRFCQDYNSSVPYEDRVDTVLGYLDLPSRERPSLITLYFESPDEPGHETGPDAPQITAAVVRIDTMIGRLLAGLEKRGLDKDVTIILVGDHGMVGKSEDKMIYLEDLASEVLIPREWVMDYTPVLHIRPPPNLDVTTIHSSMARALTSSNMNNAEFLEIYLKEQLPPRLHYSHSPRIAPIVGLVAEGYTLAYARTDKPITCGGEHGYDNVLLSMRTIFIARGPQFAQGRRIPSFENVELYEIMANILGLTPAPNNASLNFAASVLLPLRS

SEQ ID NO: 2030 - protein, 259 aa, Oryza sativa
MEGGGGGGGAPYATRTAEEVFRDLRGRRAGMIKALTTDVEKFYKLCDPEKENLCLYGYPNETWEVTLPAEEVPPEIPEPALGINFARDGMNEKDWLALVAVHSDSWLLSVAFYFGARFGFDREARRRLFNMINNLPTIFEVVTGAAKKQAKEKTPNSSSKSNKPSSKVQSKAESRSKSKLSAPKDEEGSGDDEGEEEEDDHDNTLCGTCGTNDGKDEFWICCDNCEKWYHGKCVKITPARAEHIKQYKCPDCTNKRARA

SEQ ID NO: 2031 - protein, 203 aa, Oryza sativa
MAPLLFKDMKSLSCSSPASTAICPSLERQPMVRPHKGGAIAASPLCQVPGEPRTVHRQDCRRGQQHQHKAAAANGGELVSPAGSSRYLLSSRAAAAEEIQEVEASAAPAVDAKVVREEQAGSDVKNTLTQEQVVVLKVSLHCKACAGKVKKHLAKMEGVTSFNIDFAAKKVTVVGDVTPLGVLNSVSKVKNAQFWAAPPAIAA

SEQ ID NO: 2032 - protein, 1346 aa, Oryza sativa
MNNFHVYEAIGRGKHSTVYKGRKKKSIEYFAVKSVDKSQRSKVLNEVRMLHSLDHPNVLKFYSWYETSAHFWLILEYCVGGDLKGLLEQDKKLPENSIHDLAYDLVKALQFLHSQGIIYCDLKPSNVLLDESGCMKLCDFGLARRLKDIEKTNPGDVPQPLKGTPCYMAPELFQEGGVHSYASDFWALGCVLYECYSGRPPFVANEFTQLVKSIISDPTPPLPDNPSRSFQNLINCLLMKDPAERLQWSELCEHHFWRSRMSIIPLPPQPAFDNMVDLSATPYLVERNGDKPSRQSTPPKPRDGLRKKDENSAKVFTPVKNMLSGKKNNAKPSCKADGLKGVNILRMSRVAKRNLQREKDKENYRRHPTEASENDTEVKIENNDMELDFGENPEGDAPDDNDGSDNPGSAEDEKLSTQGTDGNEENCMSNQMDMLTDEGPVKAETMIKTEHNCSENLDVVATPPSICMRKAQRAKTTSGAAAGSEPSDISAAFWHPTDLAVKPVMPGRKGDKAVETVPMLPFEALPAVDYIKLPREQMNAFNSQILQSLSGTFQVSEKQNIIKYLEMLSINSDAANIITNGPIMLLLIKMLRLSKTSVLRVQIASLMGLLIRYSTILDIELASSGIFNALSDGLRDKHDKLRRFCMATLGELLFYISTQSDQDTKEINAQESPLKDNRATASWQVPSSVIALVSSILRKGEDDLAQLYALRTIDNICSQGTDWTSRFASQDVISHLCYIYRATGKQENTRLIAGSCLARLARFSSSCIHLILERLAFKDIACTLIKGNSREQQISLNLLNSALVNSQIIPTMNRYIQSLTEEKQLVPGLISLIEQGTDVLRGKTLLFVALLCKNSRRWLPHFFCNAKLLSAVDRLGKEKEGFIHQCTEAFVQLVASLVPGILDTVSSDIQQVMGGKRHGAATALTGRAHPKSIIHLFPVILHLLGSVSFNHRVVTSHVLLQLANLMKILEAPFQARDDFQMTLLRVLEAATEEPSVILNEHKIFTSRILPSLSVLYKGNKDGDARFLCLKILSDVMIVIFSDSSLTSNEQTVSDLEKISQKYFLPMYPSFAEDEDPIPIYAQKLLVMLMEHDYVKVSDILNEATVSRCFEFLLGDLSNANVSNVKLCFALASAPDMDTDILSQLQVVRRIGNLLEFVTAKDMDDFLEPTLELCRAFIIRGISSDKIVALSKEPALLVDSAFSMSIAVDQQSCVMDICDFGGNMGIFLDLVGSSDPHISDLASDCLVLLLKAAPREATVGLLTNLPKLSVVLDLLKHGTCLRLTRLLYCLAFSCRQYLAQGMIVSISLSALMRVEALVSAFKGSHDGCLADAASYLGAELQRLPRCG

SEQ ID NO: 2033 - protein, 662 aa, Oryza sativa
MTLQMEPPPPPPRRSVSTSCDLHPGETFTGFCAACLRERLAGLEASTAAAAAAPGRRSTSAIRSLFSRPFVAAGGGGGGGGGGGAVPSGSSAAVPDLRRCKSFSCGRGGDVLAGGCGDEPQRRSCDVRGRSTLWALFHQDDRERVRDGTAFGAFPASSSAAAAALASEVQPQPPPPPPPCVPEVFLEEEIAMAEESDEITPVVEPILVVDTSGEMETEANGGREAKAMKDHIDLECSQAKKPQPKDLKEIAGSFWLAASVFSKKWQKWRRKQKLKKQDAAGSKAAAAAMPPPEKPSKPSFLRRSRLRGEACSEFAGGRRSCDTDPRFSLDAGRMSVDDVGFSWDEPRASWDGYLFGAGTGIGLGRAPPPLSRLPPILSAMEDSPAGIVERSDGQIPVEDDSQPEPDPDADTPGGSVQTRDYYDTSSSSRRRRSLERTSSVRRPSFEVTDAKPVLPAAAAITSVKDSPLIGSSEFYHFQHAEDLLEHHRFSTSSLIEDFPMSLDAAFPGPDKKPRRWRKAWSLWGLIHRRAAGRRGGASDVADRAFSEPWPELRVRGCNARMQRCNSNASARSSFSSNSGGLGSSRRSYVDGNGNVVKRRREECALERNRSARYSPGHADNGMLRFYLTPMRSASGRRAPGLPAKGGRQLRSQSFARSMLRLY

SEQ ID NO: 2034 - protein, 406 aa, Oryza sativa
MAAAVVARCGGAKKRKGEGLGEMHDDVLERVLARLPPASYFRLRGVCRRWSDAASSPTFLAACGRVPARDPWFLMLSEGEGQERRLPAVAFDAGEGEWARCGGAPGHVMPVVAASGGRVLYRAPDTGELTVANPLTGASRVLPAPPPGAALHAVAMYGSSPYRVVLITGDLPDLSMTVFDSSKNAWDDAVALSRKPDASSPERDAEGGVGGGGGGGDDETVYFLSKSGDVMATNMQRSASRQYSSAVTCGDGGEAVAYFLSNSGAVVACELSRRAFAELPRILPVYFEYSIDVVACGGRAYVVVLSELLGTASLRLWEFAGGAWRQVAAMPPAMSHAFHGKKADVNCVGHGDRVMVCVSSGEANGCFMCDVPTNRWEELPPCAGAGGEPMDFVAAFSFEPRMEVTV

SEQ ID NO: 2035 - protein, 313 aa, Oryza sativa
MQASARLYTAAASKRVIAGVSSTISRSCHRTCRWKSHAAPLSAQEAPKGPKRMTKQERRVKIEKFVEEYKASNDGKFPTMTTVRQHVGGGHYTVREIVQELEYNQRMLQLDQSKAAELPETAEHSEHLKPKDVHGNAQFNSESFSGNQNTDDLHLSQKVAATSTEIIDKTETWRLEESQMTSGTSHYTGETEAVKQDLHTADSLQGANESIKSCQTESDSIKNEDSISLGLDTKSDPTDLELGESKSDKIELNSTARFKNVSEPPVSDPIEGDKTVKANVLDREENPEVEPKTGLFGSLKSFASGIRNFWRKL

SEQ ID NO: 2036 - protein, 788 aa, Oryza sativa
MLARWLLVLLLLLPVSWCHQDRHGRRHYPRRWRSSGSRRELHEPLFPLENAPALPPPPPPPPAPFFPFLPDSAPPQLPPPVTTPAPAGGAGDGGTDAGAAATGDASSSSSSSASPHPTAPANISYMAMPIYHSAPLRSFLSSHRLLTVLLPVAAVLAAVLAAALVYLLTRRRRCSKGEPHAAHTKAVLLSPGNSTALYDGDHDQHGRGSTATAASSASSPELRPMPPLPRQFQQTRTSMPSTSQTIHEAGAEDKRAPPPQSVRPPPPPPPPPPPPPMPPRTDNASTQAAPAPPPPLPRAGNGSGWLPRRYTERAAPTVIRASAGAVHPEESPARASPEEKAADAAARPKLKPLHWDKVRPASSGRPTVWDQLKASSFRVNEEMIETLFVSNSTRRASKNGVKEANAACCNQENKVLDPKKSQNIAIMLRALDATKEEVCKALLDGQAESLGTELLETLLKMAPSREEEIKLKEFREDAVSKLGPAESFLKAVLAIPFAFKRVEAMLYIANFDSEVDYLKTSFKTLEAACEELRGSRLFHKILDAVLKTGNRMNTGTNRGNASAFKLDALLKLVDVKGADGKTTLLHFVIEEIVKSEGASILATGQTSNQGSAIADDFQCKKVGLRIVASLGGELGNVKKAAGMDSDTLASCVAKLSAGVSKISEALQLNQQLGSDDHCKRFRASIGEFLQKAEAEITAVQAQESLALSLVRETTEFFHGDSVKEEGHPLRIFMVVRDFLTVLDHVCKDVGRMNERTAIGSSLRLENAPVLARFNAVQPSSSEEESSSS

SEQ ID NO: 2037 - protein, 361 aa, Oryza sativa
MSRAQPGGAAAGGGGAARLKPSPRALFSCGIFSTCTHPALSPTATPNNNVVAGMGGAKGGSGTPCGGDAAAASPVVEAAAPAVEMSSHHQHPQQQQQQGAAVQRSVGPSSSSSSSSSSASQSFTQWRLPVHHPPQASGSAGGGGGGGGGGGGAVMMSAEEKFAAGEVVAALRTVEREMEAAARAVPVAVVAGVVAAVREPETARLAAKVLLVVLLEEGNREAAVEAGAASAAVEAVAASGPAGATAERALAALELLCTAAGGAAAVRREPLAAPVLARAVEGMAGRGRECAIGVLAAIYGRNGDEAASSPPSPPPPEVVKAVVAAMQGECSARGRRKGAQLLRALQEGGRLGLAWDGVGEP

SEQ ID NO: 2038 - protein, 609 aa, Sorghum bicolor
MKFMKLGSNPDTFQDDGNEVSIAASELVSDITVRIGTTKFYLHKFPLLSKCARFQKLIPTTGDENIEIHIHDIPGGAKAFEICAKFCYGMIVTLNAYNVIAARCAAEYLEMNETVDKGNLIYKIDIFLSSSIFRSWKDSIIVLGTTKAHLPWAEDLKLVSHCIDSVASKASIDVSKVEWSYTYNRKKLPTENGHDSPWNGVKQQQFVPKDWWVEDLTDLDIDAYKQVITAIKTKGMVPKDVIGEAIKAYTYKKLPSLSKVSMIHGDAKVRAMLVTITCLLPSEKGSVSCSFLLKLLKATNLLKCGEMCRKELMKRIARQLEEASVSDLLIPTVDGDTTVYDIDLILSIVEEFVRQDSKNAQRHNGGEVNDHVSAPSASMITVAKIVDGYLAEVAKDPNIPVYKFFSLAETVSANSRPVHDGLYRAIDMYLKEHPGLGKSDKKRLCALMDCKKLSPDACAHAVQNERLPLRIVVQVLYHEQTRASAAATIRADSIGIGSYESSRSGATTNTEDEWDGVMAVEDLSLSKTTKLDKCHTASTIVEKNHGGNKGANGRVKGGATSKKALGKIMSSKGQTGERSSSDSSDSAILPSQEHPKRTPARSTTKSAAA

SEQ ID NO: 2039 - protein, 405 aa, Glycine max
MVLEATMICIDNSEWMRNGDYSPSRFQAQADAVNLICGAKTQSNPENTVGVLTMAGKGVRVLVTPTSDLGKILACMHGLDIGGEMNLAAGIQVAQLALKHRQNKKQQQRIIVFAGSPVKHEKKMLEMIGRKLKKNSVALDIVNFGEEDEGKTEKLEALLAAVNNNDTSHIVHVPSGPNALSDVLISTPIFTGDGEGGSGFAAAAATAAAGGVSGFEFGVDPNLDPELALALRVSMEEERARQEAAAKKAAEDAANLEKGDEQQASSQHATMTERAGAATSEAENKTSDLMDDENALLQQALAMSMDDSAISHDVKDTDMSEASASDPDLALALQLSITDSAKDQSSQSDMSKLLADQSFVSSILASLPGVDPNDPSVKDLLASMQNQSEPQQKNDDKPSNEEEKK

SEQ ID NO: 2040 - protein, 103 aa, Arabidopsis thaliana
MAYVDHAFSISDEDLMIGTSYTVSNRPPVKEISLAVGLLVFGTLGIVLGFFMAYNRVGGDRGHGIFFIVLGCLLFIPGFYYTRIAYYAYKGYKGFSFSNIPSV

SEQ ID NO: 2041 - protein, 340 aa, Arabidopsis thaliana
MAEYICLFGKDSAAIVIKQPKKSPLFLRMIVLVFAMVCGLYICAVCLKQLSNVSFQTSQLVQTSPIDSHSLRFVTRIHYPKPQTFNRAECGHNPVRYFAILSMQRSGSGWFETLLNSHNNVSSNGEIFSVLDRRKNISSIIQTLDRVYNLDWFTSASKNECSAAIGFKWMLNQGLLENHKDIVEYFNRRGVSAIFLFRRNPLRRMVSVLANSYDRYAKLLNGTHKSHVHSPAEADALSRYKPVINSTSLIHDLQETENSAAKALEYFNTTRHIVVFYEDLITNQTTLKQVQEFLNIPVKDLSSRQVKIHRGDLSDHIKNWEDINKTLNGTEYEKFLRADY

SEQ ID NO: 2042 - protein, 619 aa, Sorghum bicolor
MRGGGGASGLAFRGVVEEEEEEAVVSAPERPMQRRRQRRRWGEEVDDGYSPSSTGGGGSSCCDSFGCDSPLAGFVRPDGDPDTDLETDGLATSSSSASAAFTERQDDEAEEVLCGVKEEEWAQVQEPAKNPAAGRATAECHNQRYRTEAAVLLHGRKGSKQRPASLDLGSPGFHGATFSPSFVIGGVGLMNKGLGASLIRSDVFHSPGTPNYPRHRASVLGCQKGWSSERVPHPSKGSRRYPGSSMAFPYSNGRTLPSKWEDAERWIFSPNSSDALGRTTVAHARRPKSKSGPLGPPGRLGGQYSSVSSVSLLDSGRAGPITANSPFMAGVLMPEHVCGGKNTNGTYSGRPIGDEISIGRGVKICPLNGGSHPIRTSRVRQRLDYALESSASLPSTRESIQDEQVEITEDSASTIASIISRKDAATQTSPELSRSSSPNTRPTFNRSLSTEQVKESGSCFSDLDIRDVQMDDRVTLTRWSKKNVTRSSNKNSTNIIEWKEKTVESNSSSWGFAEAKCISKIDREDTKITAWENIQKAKAEAAIQKLVIKLEKKRSSSLDKILNTLKSAQRKAQVMRERERDAVTANQDGKGSRKAKKRVQLSKNGQISSLSGCFTCHAF

SEQ ID NO: 2043 - protein, 369 aa, Glycine max
MWVAAATKPFIKFQFHRHTTSLPLLLMANQASLSFSSSVSPVHAPLKRVGTHNGSFHCDEALGCFMIRLTNKFNSAEIVRSRDPQVLEVLDAVLDVGGVYDPARDRYDHHQKGFEEVFGHGFSTKLSSAGLVYKHFGKEIIAKELEVDEEHRDVHHIYLAVYKSFMEAIDAIDNGINQYDTDQPPRYVNNTHLSSRVGRLNLDWTDPDQSPEKENEAFQRAMALAGSEFLDSVRFHVNSWLPARSIVMETLAARHTVDPSGEILVLTKFCPWKLHLFELEGELKNDPAVKYVLYQDERSKHWRVQAVAVSPDSFQSRKALPSQWRGLRDEELSKKSGIPGCVFVHISGFIGGNQNFDGALAMAKAALKM

SEQ ID NO: 2044 - protein, 689 aa, Glycine max
MATHVSHVIVAAAFLLLLLPFSFSFSISHSHRSAAINLFAATPTSLEDAYEALRVFQILGIEEKNTPVNEDTCQKVVESLASSSPLKDLFYALKVNAILKCNVNGNVFKDIASRLKATVHDASALLDIYYSIGGLVVIKDQDSNVDVLLADVDGVFQSIKVLSQSDGRWRYSSDNPESSTYAAGLALESLAGLISLASSEFDQSKVNVVKNGIVKLFDGIEKYEDGTFYFDEKYVGGHEQRGSLSTTSSVVRGVTAFAAVTSGKINLPGDKILGLAKFFLGIGIPGDAKDFFNQVESLAFLESNRISIPLILSLPETAYSLTKKGQLKVKVNTVLGSAAPPLTVKLVRAFSTGAKDSAIIDSKELRYDQESGFHVLDALPKNVDVGTYVFVFEIVLHDFGSEKVYATGGQIHVPIYVTGIIEVGNAEITVLDSDLGSAETQKKLDLAGNDAVSLSANHLQKLRFSFQLTTPHGHVFKPHQAFFKLRHETKVEHIFVVGNTGKKFEKVLDFLGLVEKLFYLSGKYEIELTVGDAVMENSFLRLLGHVELDLPEAPEKAPRPPPPPVDPYSRYGPKAEITHIFRSPEKRPHQELSLAFLGLILLPFIGFLVGLLRLGVNLKNFPGSTVPATFGILFHVGIAAVLLLYVLFWLKLDLFTTLKAFGLLGAILMFVGHRILSHLAFTSAKLKSA

SEQ ID NO: 2045 - protein, 380 aa, Glycine max
MPRSRGSELPQRQSPRGPHQHRTSSSDSDPLHHRLIADRSPKLGDRRSPRGTQSEGLNQKKLGTRIADLESQLGQAQVELKVLKDQLASAEAAKKEAQDELVKKAVQSVLPVVEKLQEKSTSKNAPESNKTEIKPQDVIPDDDQLETDVFEVPIEKLTIEFSKPADQSEKETQPFEDTNAAAISKPEKLSVDEHELTLKNDEIALLKTSLEEKGKELESMSNEKENLKNQLNEAVSKVSAAQTKEEGMTLQLNQLREELETSKANADKLDEKLKSVEAEKEGLESEMKKLRVQTEQWRKAADAAAAVLAGGVDMSARIPERCGSMDKHFGGTFETPAGRYNGYVGSPGMADDLDDSFGGGKRKGSGIRMFGDLWKKKSQK

SEQ ID NO: 2046 - protein, 536 aa, Glycine max
MAAVRSSSVRRLGSTIKGSFSMELVHHSMCMNLARFPSDSFNDPYYKRELQFSKNQFSNLASESLGSSHHFGTRANVLVKPTFSGYCFWSSLPFASMSNHVLNRRMYSSSSVGDKGSRDGGTEVSAGSGASDMNTGGDSVVGGDWAERIKDAWKSVAEAASYAGDKVKETSDDLTPYAQQLLDSHPYLDKVVIPVGGTLTATIIAWFLLPRILRKFHKYAMQGPVSLLPASVAGEPVPYEKSFWGAMEDPVRYLVTFIAFSQIGVMVAPTTITSQYLAPVWRGAVIVSFVWFLHRWKTNVFARSLSSQSLLGLDREKVFALDKISSIGLFVIGIMALAEACGVAVQSIVTVGGIGGVATAFATKDILGNVFSGLSMQFSKPFSIGDTIKAGSIEGQVVEMGLTSTSLLSSEKFPVIVPNSFFSSQVIVNKSRAEYRAIITKIPLQTEDLSKIPQISDDVKSMLRSNANVFLGKDVPYCFLSRIESSYAELTLGYNLKHMRKDELYSAEQDILLQAVQIIKNHGVALGSTWQDTSSK

SEQ ID NO: 2047 - protein, 592 aa, Glycine max
MDVWSLQKLVKTAPSKALVIRINLVCLAIFLVVYATFLLRPSSSVYFENAASLVRCSLRECHHKGEKSIKMKAVLERNEDRRAKQNASKIEVPSFFGEMGKGMKIGMVNMQEDDVSEWSTLGETSHVYFEKVSQFFNWTDLFPEWIDEEEETDVPSCPEIPMPEFTAYEGMDVIVAKLPCNYPKEGWGRNVFRLQVHLIVANLAVKKGKRDWNWKTKVVLWSKCRPMLELFRCNDLVKQENEWWYYEVDAMRLEQKVSLPVGSCNLALPLWEQGIDKVYDTWNLEQSVKSEARSKREAYATVLHSSEGYVCGAITLAQTLLQTGTKRDLILLLDTSISVAKRRSLELSGWKIRLITRIRNPRAENGTYNEYNYSKFRLWQLTDYERVIFIDADIIVLRNLDILFHFPQMSATGNDQSIFNSGIMVLEPSNCTFHVLMSRRHDVISYNGGDQGFLNEIFMWWHRLPRRVNYLKNFWANTTIEAGRKNAMFGAEPPKLYAIHYLGLKPWHCYRDYDCNWDVEDQRVYASDVAHRRWWKVHDAMDENLQKLCRLTRQRRMELNWERRKAGKLGLPDMHWKINVTDPRRAGSMLIG

SEQ ID NO: 2048 - protein, 608 aa, Glycine max
MELRRRSSAAAKASDALPLPLHVTNAFFFTLFFSLAYYLLQRWRDKIRSSSPLHLLSLSDIAAIFALLASVIYLLGFFGIHFVQSFVARPADEEPSQCASIDRADEDIANSIIEGDAQPSPLCRVDNDMKGKKVIQRPFECTKPILTELISSIDRVDSDNIIADPVINGKEAVQPSFQCTKPILTKLISSDDDIIIVDSVINGTVPSYSLESCLGDSRRAAAIRREVVQRETGRSLAGLPLEDFDYDAILGQCCEMPVGYVQLPVGVAGPLLLDGAEYTVPMATTEGCLVASTNRGCKAIYASGGASSVVFRDGMSRAPVVRFATVTRAAELMFYLEDPLNFDTLAVVFNRSSRFGRLQSIKCSIAGKNVYIRFTCSTGDAMGMNMVSKGVQNVLDFLQSDFPDMDVIGISGNYCSDKKPAAVNWIEGRGKSVVCEAIIKDDVVKKVLKTSVAALVELNMLKNLAGSAVAGALGGFNAHASNIVSAIFIATGQDPAQNVESSHCITMMEAVNDGRDLHISVTMPSIEVGTVGGGTQLPSQSACLNLLGVKGASKDSPGSNSRLLATIVAGSVLAGELSLMSAIAAGQLVKSHMKYNRSSKDMSKVSSS

SEQ ID NO: 2049 - protein, 337 aa, Solanum lycopersicum
MEENVLCQWSVVRSIFAILQWWGFNVAVIIMNKWIFQKLVFKFPLTVSCVHFICSAIGAYLVIKVLKLKPLIVVEPTDQWRRIFPMSFVFCINIVLGNVSLRYIPVSFMQTVKSFTPATTVILQWLVWRKSFEWRIWTSLIPIVGGILLTSITELSFNTLGFCAALFGCLATSTKTILAESLLHGYKFDSINTVYYMAPYATMILALPSLLFEGAGVVEWLYTFPSVVPSMLLIFLSGVLAFCLNFSIFYVIHSTTAVTFNVAGNLKVAVAVTFSWMIFQNPISAMNALGCGVTLVGCTFYGYVRHILSQHARESPRTPENKMESVPLIHEKEQDQR

SEQ ID NO: 2050 - protein, 875 aa, Phaseolus vulgaris
MPQGNAAAAAALLDNGGDAGDAVMARWLQSAGLQHLASPLASTAIDHRLLPNLLMQGYGAQSAEEKQRLLKLMRNLNFNGESASEPYTPTAQSLGGVAGSDGFFSPEFRGDFGAGLLDLHAMDDTELLSEHVVSEPFEPSPFMPGDARVFEDDFNPINCKLESGEADADASISLPMNEKEYSTRENNVAKIRVVVRKRPLNKKELAKKEDDIVTVSDNAYLTVHEPKLKVDLTAYVEKHEFCFDAVLDEHVTNDEVYRTTVEPIIPTIFERTKATCFAYGQTGSGKTYTMQPLPLRAAEDLVWQLHQPVYRNQRFKLWLSYFEIYGGKLYDLLSDRKKLCMREDGRQQVCIVGLQEFEVCDVEIVKEFIERGNAARSTGSTGANEESSRSHAILQLVVKKHSEVKESKRNNDGNEARSGKVVGKISFIDLAGSERGADTTDNDRQTRIEGAEINKSLLALKECIRALDNDQIHIPFRGSKLTEVLRDSFVGNSKTVMISCISPGAGSCEHTLNTLRYADRVKSLSKSGNPRKDQVPNPAPQTNKEISSTSSIPTSASAEDFNYQRQEKTMDIGRKFIERENSSYSSAATAADKQPLSFSSNYLSNGREEKGLPSASLDRERFEPKNSYGDTTSQKMNSYSQIDTGEKLQKVSPPRRKGSKDEKSERPANWMKRDANGSDTFTTNSKQQSTGNYNTVSKDEKSDRPSNWMKRDSSSSDLFTTSSKQQSTGNYAPKDEKSERPANWMKRDASNSDIFSTSLKQPSTGNYNNVTTGSRPYEAESSPNGNINAVLEEEEALIAAHRKEIEDTMEIVREEMKLLAEVDQPGSLIDNYVTQLSFVLSRKAASLVGLQARLARFQHRLKEQEILSRKRVPRQ

SEQ ID NO: 2051 - protein, 473 aa, Phaseolus vulgaris
MDMKAYSVSWTKHKKEPYFAVPHTRRQQQCIQANHDTPEETTSLNHSLKLALSTSQNTLLPTLPAFVVLLLLVTSIGTSFSHPIASNSPLPPPSHPTANHTFRPAPVSQKFRTIRAHLKKINKPPVKTIKSPDGDLIDCVFSHHQPAFDHPLLRGQRPLDPPERPKGHHNGETVTESFQLWTDSGEICPEGTVPIRRTTEQDFLRASSIRRFGRKVRRDSTGTGHEHAVVFVNGDQYYGAKANINVWTPSVTDPYEFSLSQIWVIAGSFGNDLNTIEAGWQVSPELYGDNYPRFFTYWTTDAYQATGCYNLLCSGFVQTNNRIAIGAAISPRSIYNNRQFDIGLMVWKDPKHGHWWLEFGSGLLVGYWPAFLFSHLRNHASMVQFGGEIVNSRSRGYHTGTQMGSGHFAEEGFRKAAYFRNLQVVDWDNNLLPLSNIHQLADHSNCYDIRVGSNNVWGTYFYYGGPGRNVRCP

SEQ ID NO: 2052 - protein, 484 aa, Glycine max
MEESGDARDLQKPFLHTGSWYKMGSRQSSIMGSSTQVIRDGAVSVLFCVLIVALGPIQFGFTCGYSSPTQGAIVRDLNLSISEFSFFGSLSNVGAMVGAIASGQIAEYIGRKGSLMIAAIPNIIGWLAISFAKDSSFLYMGRLLEGFGVGIISYVVPVYIAEIAPQNLRGGLGSVNQLSVTIGIMLAYLLGLFVNWRVLAILGILPCTVLIPGLFFIPESPRWLAKMGMIDEFETSLQVLRGFDTDISVEVHEIKRSVASTGKRAAIRFADLKRKRYWFPLMVGIGLLVLQQLSGINGILFYSTTIFANAGISSSEAATVGLGAVQVIATGISTWLVDKSGRRLLLIISSSVMTVSLLIVSIAFYLEGVVSEDSHLFSILGIVSIVGLVAMVIGFSLGLGPIPWLIMSEILPVNIKGLAGSIATMGNWLISWGITMTANLLLNWSSGGTFTIYTVVAAFTIAFIAMWVPETKGRTLEEIQFSFR

SEQ ID NO: 2053 - protein, 792 aa, Medicago truncatula
MSLPTKRSSGATSSSSSPSTSMKKAKSSSTFDDVVFDSSMDDDLKPTDLPRGGAASNMAANLARKKATPPQPAKKLLIRLHKGNPTVPSNFEDKTWAILKSAICAIFLKQPDSCDLEKLYQAVNDLCIHKMGGNLYQRIEKECEVHISAALQSLVGQSPDLIVFLSLVERCWQDLCDQMLMIRGIALFLDRTYVKQSPNIRSIWDMGLQIFRKHLSLSPEVQHKTVTGLLRMIDSERLGEAVDRTLLNHLLKMFTALGIYAESFEKPFLECTSEFYAAEGVKYMQQSDVPDYLKHVETRLQEEHERCLIYLDASTKKPLITTTEKQLLERHIPAILDKGFSMLMDGNRIEDLQRMHLLFSRVNALESLRQAISSYIRRTGQGIVMDEEKDKDMVQSLLEFKAALDTTWEESFAKNEAFSNTIKDAFEHLINLRQNRPAELIAKFLDDKLRAGNKGTSEEELEGTLDKVLVLFRFIQGKDVFEAFYKKDLAKRLLLGKSASIDAEKSMISKLKTECGSQFTNKLEGMFKDIELSKEINESFRQSSQARTKLPSGIEMSVHVLTTGYWPTYPPMDVRLPHELNVYQDIFKEFYLSKYSGRRLMWQNSLGHCVLKADFPKGKKELAVSLFQTVVLMQFNDAEKLSFQDIKDSTGIEDKELRRTLQSLACGKVRVLQKMPKGRDVEDYDSFVFNDTFTAPLYRIKVNAIQLKETVEENTNTTERVFQDRQYQVDAAIVRIMKTRKVLSHTLLITELFQQLKFPIKPADLKKRIESLIDREYLERDKSNPQVYNYLA

SEQ ID NO: 2054 - protein, 395 aa, Glycine max
MGSFVKLSRRALETEMPVMVQMQELLRGAKNAVSLAQGVVYWQPPKQALEKVKELVSEPLISRYGNDEGIPELRAALVKKLRDENNLHKSSVMVTSGANQAFVNLVLTLCDPGDSVVMFAPYYFNAYMSFQMTGVTNILVGPGSSDTLHPDADWLERILSETKPPPKLVTVVNPGNPSGTYIPEPLLKRISDLCKNAGSWLVVDNTYEYFMYDGLKHSCVEGNHIVNVFSFSKAFGMMGWRVGYIAYPSEVKDFAEQLLKVQDNIPICASILSQYLALYSLEVGPQWVVDQVKTLEKNREIVLEALSPLGEGSVKGGEGAIYLWAKLPHGNAHDDFDVVRWLANKHGVAVIPGKACGCPGNLRISFGGLTENDCRAAAERLKKGLEELVRDGLRE

SEQ ID NO: 2055 - protein, 756 aa, Glycine max
MADYFSGSVEFGLNLSKRIYYGKGSAPSPAPAMSRSLSKSPEGYLPTAPMCYAVISDPEKVENPDIRSYQPYVLGQCEPPALIPLELHGVAMEVECSLDTAFVTVTGKWRVHCVTASSTCDCQVAIPIGEEGSLLGLEVDGSGRSYHTELISLKDEKDKNKVAKAKDGYFLKSHIYTVKIPQFRGGSVFSIKIRWSQKILFHDGQLSLCVPFSFPSYVNPAGRNISKKEKIFLKVNSGATTEVLCKTTSHPFKELLRQAGKLNLSYEAEVLTWSSTDLSFSYSVSSNDIFGAVLLQSPFLRDFDEREIFCLYLYPGNSPDRKVFKKDVVFVVDISASMKGTPLDNTKNSLLTSLSQLNAQDTFNIIAFNGAVYLFSSSMERATEEAILNATTWVDTNFIANGDTNIMLPLTQAMKLLEKSTDSVPLIFLVTDGAVEDERDICNFVKSYVSSGQSFRTPRIYTFGIGLYCNHYFLQMLAQIGRGHYDSAHDLDSIDFRMQRLFSSASSVMVADITIKSLEGLDSLELFPTHIQDISFESPLILSGRYSGTFPELVKVTGTLADMTNFVVDLKVKREKDMQLSNVLSKRHIDQVTAQAWLLKSKELEEKVTKMSIQNKVPSEYTCMNIVLVQSDEGKKAPEQFLLQKAYNKLSFQKLELNNQNLFLGGLNLGFGDLKATAENLPPAIKEAKPPEGLLGKAASNCCGRLADTCCGMCLLQTCTFVNDQCTIVCTQICAALACFELIKCCVELCDCDCLQ

SEQ ID NO: 2056 - protein, 544 aa, Glycine max
MAEIRLTRVEQGQTKIKNVPIAVTPEGFWCCPSPVVFQKSLKTQNTLNKHKPSSPPPPKTSVQKKPVPVSVSVPVCERRTTTPAPSGLVLSDEKQCATAPERPPPPTATSVAAAERAPRQKIESLPKKVAIEFGEPGTCDMKVVLLGKQGFCVKLSVHRDVLTQKSGFFSEKLSEQSGLSCLQIGDCEDVEIYVETVGLMYCKEMKQRLMKQSVSRILRILKVAEFLGFSSCIQSCLEYLEAVPWVGEEEEEKVVSTVLQLQAEGIRVNPVLKRISSDISNVPKDTLSHIIDLVLKSNEERGRREMKSIVLKLLRENNSLPSYARSTDICNDTIYRSCRSCLDSLLSLFKQAAEPDKPSEDRDPIAKCIALEADNLSWLLEILVDKQAADEFALMWANQQELALLHTKLPTMLRYHVSCLSGRLYVGIGRGELLPSKDTRRLLLQTWLQPLMNDYNWLQHGCRSFDRKLVEEGIGRTILTLPLEYQQSILLSWLGSFLKTGDSCPNLQRAFEVWWRRTFIRPYVENQGNVAVSDSSLMLPKQHE

SEQ ID NO: 2057 - protein, 533 aa, Phaseolus vulgaris
MDRFPSSTIIPESFLGAKDDLTTQLALVWNQIKAPLIVPLLRLAVFLCLIMSVMMFIERVYMGVVITLVKLFVRKPEKRYKWEPMKDDIELGNSSYPMVLVQVPMYNEREVYQLSIGAACGLSWPSDRIIIQVLDDSTDPTIKELVQLECQRWASKGVNIKYEVRDNRNGYKAGALKEGMKRSYVKQCDCVAIFDADFQPEPDFLWRTVPFLVHNPELALIQARWKFVNADECLMTRMQEMSLDYHFTVEQEVGSSTYAFFGFNGTAGVWRISALNEAGGWKDRTTVEDMDLAVRASLKGWKFLYLSDLKVKNELPSTLKAYRYQQHRWSCGPANLFRKMVLEIINNKKVSLWKKIHVIYSFFFVRKVVAHINTFVFYCIVLPATVLVPEVVVPKWGAVYIPSVITILNAVGTPRSLHLLVFWILFENVMSLHRTKATIIGLLEASRVNEWVVTEKLGDALKAKAGGKAPKKPRFKIGDRIHLLELGVAFYLFFCGCYDVMFGKNHYFIFLFIQALAFFIMAFGYVGTIVPQS

SEQ ID NO: 2058 - protein, 331 aa, Glycine max
MALNNGVPATGTGLIVSFGEMLIDFVPTVSGVSLAEAPGFLKAPGGAPANVAIAVSRLGGKAAFVGKLGDDEFGHMLAGILKENGVRADGINFDQGARTALAFVTLRADGEREFMFYRNPSADMLLKPEELNLELIRSAKVFHYGSISLIVEPCRSAHLKAMEVAKESGCLLSYDPNLRLPLWPSAEEARKQILSIWEKADLIKVSDAELEFLTGSDKIDDESALSLWHPNLKLLLVTLGEHGSRYYTKSFKGSVDAFHVNTVDTTGAGDSFVGALLAKIVDDQSILEDEPRLREVLKFANACGAITTTQKGAIPALPKEEAALKLIKGGS

SEQ ID NO: 2059 - protein, 584 aa, Phaseolus vulgaris
MRDENSKKSKLSWSKKMVRKFFNIKCKTEDSLADVTAYGGGDVECRSRNSFSEREPCTIKKSKTEKFSRSTDQVRRARMNLDHPRIIDVQNYSIFVATWNVAGRSPPSTLNLDDWLHSSSPADIYVLGFQEIVPLNAGNILGAEDNGPAKKWLALIRKTLNNLPGTSGSSGCYTPSPIPQPVVELNADFEGSARQKNSSFFHRRSFQTTSSGWGMDNDPSVVQPRLDRRYSVCDRVIFGHRPSDFDPSFRWGYRPSDYSRASDYSRPSDYSRWGSSDDDNGLGDSPSTVLFSPMSRGGGGPSFNEEGYAMPGHSRYCLVASKQMVGIYLTIWVRSELKDHVQNMKVSCVGRGLMGYLGNKGSISISMSLHETSFCFICSHLTSGQKEGDELRRNSDVMEILKKTRFPRVQGVDNDKSPQTILDHDRIIWLGDLNYRIALSYRSAKALVEMQNWRALLENDQLRIEQKRGRVFLGWNEGKIYFPPTYKYSTNSDRYAGDDMHPKEKRRTPAWCDRILWYGEGLHQLSYVRGESKFSDHRPVYGIFWAEVESAHGRLKKTMSCSRSRIEVEELLPYSGGYTELSFF

SEQ ID NO: 2060 - protein, 415 aa, Sorghum bicolor
MPTTPRSRSQARTTRPWILSGMDFADSRRKPNFTGKIAVAAALTVMCIIVLKQSPSFSGTSVFSRRETGVTHVLVTGGAGYIGSHATLRLLSDNYRVTIVDNLSRGNMGAVRVLQRLFPEPGRLQFIYADLGDAKAVNKIFSENAFDAVMHFAAVAYVGESTMEPLRYYHNITSNTLTVLEAMAAHNVNTLIYSSTCATYGEPDTMPIVETTPQNPINPYGKAKKMAEDIILDFTKSKKQSNMAVMILRYFNVIGSDPEGRLGEAPRPELREHGRISGACFDAALGIIPGLKVRGTDYPTADGTCIRDYIDVTDLVDAHVKALGKAEPGKVGIYNVGTGQGRSVNEFVKACMKATGASIKVEYLARRPGDYAEVYSDPSKIYKDLNWTAQYTDLGQSLAQAWKWQKAHPNGYGSA

SEQ ID NO: 2061 - protein, 583 aa, Arachis hypogaea
MGSVSSEDGSDQQSDRCGSYSLSADVSESESCSSFCGRHFDADGGASSSANLSPRPVGGAAVPAGGHFHFPSQVMLPVIGGKDVVVWDHKPEKRDLDLSEVEMMKERFAKLLLGEDMSGGGKGVCTALAISNAITNLSATVFGELWRLEPLAPQKKAMWRREMEWLLCVSDSIVELVPSVQQFPGGGTYEVMATRPRSDLYINLPALKKLDGMLLGMLDGFQDTKFWYVDRGILLGDSKECDDAYSPGRGRTSVRQEEKWWLPSPKLPPNGLCEDDRKRLQQCRDCTNQILKAAMAINSSVLAEMEIPGAYIESLPKNGKACLGEIIYRYITADQFSPECLLDCLDLSSEHHTLDVANRIEAAVHVWRLKDHKKHLNTVKARRSWGGKVKGLVADGGGDKNHSLAQRADTLLQSLKHRFPGLPQTALDMAKIQYNKDVGQSILESYSRVMESLAFNIMARIDDVLYVDDSIKRCAAAESISLFNRGGFGGLPIQKRMTPSPFSIQHTPYASPPFATPSFCSSSPITGSPCSPRRMHTAKRNGLKDTTDSTKSEKAASAEFERVWSYTGNLSARRMSSDAPERD

SEQ ID NO: 2062 - protein, 123 aa, Zea mays
MEAQDDCKWRQIPAFGDWNVWDGDMPVTQYFQAGAFFFAAPAEKGDADLFKVPQLPAKPYGYKKCVVRVKGEKETAVPPAARKGRRRRCVSEQHKWKPKGAVDEDLYKISPQLLCKVKKASAL

SEQ ID NO: 2063 - protein, 272 aa, Oryza sativa
MEGGGGGGGGGGGGGGGGGGGGAPYATRTAEEVFRDLRGRRAGMIKALTTDVEKFYKLCDPEKENLCLYGYPNETWEVTLPAEEVPPEIPEPALGINFARDGMNEKDWLALVAVHSDSWLLSVAFYFGARFGFDREARRRLFNMINNLPTIFEVVTGAAKKQAKEKTPNSSSKSNKPSSKVQSKAESRSKSKLSAPKDEEGSGDDEGEEEEDDHDNTLCGTCGTNDGKDEFWICCDNCEKWYHGKCVKITPARAEHIKQYKCPDCTNKRARA

SEQ ID NO: 2064 - protein, 226 aa, Phaseolus vulgaris
MAAATITCKLSLLLSLFSVWFLGVTSASLPPTCQRIECPSYDLIQLGNGYEIRRYNSSVWIANTPIQDISLVEATRTGFRRLFDYIQGKNNLKQKIEMTAPVISEVLPSDGPFCESSFVVGFYVPKVNQANPPTPTEKDLKIKRWKTVHVAVRQFGGFVKDTSVGEEAAALQASIAGTKWGAAVEKSKRAGYSVYTVAQYNAPFEYDNRVNEIWFFFDIEDALRSM

SEQ ID NO: 2065 - protein, 899 aa, Setaria italica
MDAEEASPPPQPPPWAQNKSAAAIDSSSAPLAAAAARLSARSRALPSSRDFHFYNNFPAFKSPVGAAAAKADASLGVLGAAPLLPARQQPFPGGGDLDDAHDWLVAVNDDLLERFGASVDEFKALREKEEASGRRAASEAGDGDGFQVVYGKKKKKVGDGEEGVERAEAFGASSSVKMAKDKAAAPGMKAKVPFHIRTIPRPQGVYRIVVDNSTKPFEHALLERSEDGTRPVHPLEKLPIEQLINRNVPDSEPVKPPALDDTPFTFVEDLKTLEVLATKLKSATEFAVDLEHNHYRTFQGLTCLMQISTRTEDFIVDTLKLRRYLGDYLREFFRDPTKRKVMHGAGRDIIWLQRDFSIYVCNLFDTGQASKVLQMDRNSLEHLLHHFCGVTANKEYQAADWRLRPLPDEMIKYAREDTHYLLYIYDLMRLRLVKESSADSDMLLEVCKRSNEICLQLYEKEQLTDSSYLHLHGLKENELDARQLSVLSSLYRWRDGIARAEDESTGYILPNKSLLEIAKEMPVTSGKLKRIVKSKNFERHLSTVINTIRDAISASGAFESVAEQLKKGKLEELTMANVKNSSEDTEMIPAVDVDNNEDPSDESAVVSTVITNVGTASPCMGTVTSEASFGNMHLEDFTPEKNSGTSSGFTGLADKEILSNGQQQVAKATVQVSKRTTAFGALFGKPAAGRRPNLFPGLSSDQGKSKVDKITSSVVLPFHNFSGSVKPPSGSIPLKEQVHSEPESVQHSDPACQMEDVIQLDTETDDPQPPESRNDDEHQEPKVMEMSKSPSDAPSDTEQRFRSLNEERNVHQNQKIPQEPEFRFPVVPFDYAEARENLVCGEPKAETKKDNAVARPINTDSGDKRRTSNKPGAGEEGNFQHPRRRQAFPPSGNRNFTYH

SEQ ID NO: 2066 - protein, 684 aa, Setaria italica
MSGHRIPAAARLGGITSRRHAELLLHSGVGDVSVKDLRLRRVVPPASGSLDSSPVCAAPVKPGSVESTPPEAASAVAVAEDLDRKPVLPRSKLVRDPGSFGYRRLLPFLNEMAKNDSSIGRSDSPLVDAPLGEIRCESDAMDSVEPVVAKTGGDPEVKDGCNNVTEEANTVPHDLASSKPWLARCTRSRFFRHPSSFSYKRMLPFLMENEISSQEGERVKIRRVADERILASDENGVSASGQQHLVVSDDSSQECNRAQVDRMEEEETPKADENHVLDDRQPQPAVTKASPPECNAAEGQNVMQQEALTTSQDPLTSSEGDLTSDGDVVQASGHHHIVVSEDSPEECQRDEVKRSVQDEAVKSDWSHVLDSREFQPAVSEVFPSKNSVAEVQKATQEESLPSDGDEENSNKGDHLAKEQPQPCVTKESLTAQPHDSAEITEVPQCQNKDAGSHDAGFVSPTKTVIPLLHRHCAQPEDSVTSVDDQLRDSDVQMICRPSDPCAVDRSLSVEEMSGCIPLTESGCKAGISRPRGLHSTEKRGFSPKKLSPKKGILKRHTRGCKGICMCLDCCTFRLRADRAFEFSRKQMQEADDIICNLLKEVASLRSLVEKPAGQQESTQAACKRASQVEEVARERCQQMFVDLNSHCRIPGPRVRFAQYVEEKKALPSPREKKASPSPRSSSWR

SEQ ID NO: 2067 - protein, 842 aa, Oryza sativa
MEALGDMEGEEGQRRQQQIRVVRCPKCEKFLPELPNYSVYVCGGCGATLQAKKNSASENSSEKSDGGHVKYLEVLESSPDNKGAASKDTCEAAQEGEAKNGEAKAEERQVLLDRMAACDDSRIPREPNALKLEASLRDDSREIREAKYRRIRSEDKGEAKHTVRARDRSPRSVVDAIPPNAYPAEGPSDYHIKSRFRHTNGEQADMRNLEGLNRVNGLEKDRADLLRMLDELRDQVQRSCEITNKPSGSTSTDKAVDASGLYNPRERLSRLRHGSPQLQRSGSQQSPSLNGQAPCIPQAYAPGTAQQDLHGYGEPMAHMGAPSYPVGTYPWRNFDNYFYGQYDPDPLISYHHDGFYHQPACSCLHCYHREFLPVQGPPLGFNHRRVPPYVMNNPRVYPVDGPAMFGTQNYNSRVNASMQRNHMRAAMSKKPAQTCEPIACGAPFTICYNCYEVLQLPKKSPVPGKDEYKLRCGSCSHALVVKLDGSRLDVSAPSPISHISGGSKISSNDGQGSNANSAPHERVLPLYSFSAASHGSQDLPSNSSEAEKMQGVSSSCSISEDENSPARSNSQRDTPGSRDLHPEAEVSTRVPSLHLRDHFGYSPSEKVVDGSGKGSRSTRSEHEKAVLTESFKQNTVKDVSVVNIMDLSDDEYDDPDYMQDRGDVAQPVDHPRAVKTGDSFFTNLIKKSFKINNGMGNGRAKVFINGYPISDRAVRKAEKIAGPIYPGEYWYDYRAGFWGVMGQSCLGMIPPYIPELNYPMPKKCAAGNTGVFVNGRELHQKDLDLLVGRGLPDSPGRSYRVEMSGKVSDEVSGEELYCLGKLAPTVEKMKRGFGMRVPRIIP

SEQ ID NO: 2068 - protein, 327 aa, Sorghum bicolor
MASKAPPDLLNATSSIHMIVRQLFSRMVFSLQMECSLSMEIISFWLWLEGNGHPDFLASVESFDNYNLRGIAVAGKMFIEALRRKSSHFNHRSEEEGYFQKEATEGILFYLNNFCYKALEDILEIAEAKERIYRNNHQQVQQQNMKGKAPIMSTKDLLSKIRASFTGNPSHEEGSSSRSMPSPKNQILRDIENPIDQCLSTYPLATLFDSLNLRDDPQADAIQLQIQVQRQPSIPRDERTLFVTFSNGYPFTADELFEFFEGNFGGVEIISVEEPVEPRPPLYAHICFFTQETILHILRGNPRVKFVIRGKHLWARQFVPKRKKVRN

SEQ ID NO: 2069 - protein, 371 aa, Solanum lycopersicum
MKSSIKVLLLLVLLCAISSISIAVIDGLLKNGNFEMPPSKADLNGTEVLKHNAIPEWSISGFVEYIKAGQKQGDMLLVVPEGYAAVRLGNEASIKQILNVTKGMYYSLTFSAARTCAQEERINVSVTPDFGVLPIQTLYSSSGWDSYAWAFQAEFPQVEILLHNPGVEEDPACGPLIDSIAIRTLYPPRATNQNLLKNGDFEEGPYVFPNTSWGVLVPPNIEDDHSPLPAWMVESLKAVKYLDSDHFSVPHGKRAIELVAGKESAIAQVARTTIGKMYQLSFKVGDASNACEGSMIVEAFAGRDTLKVPYESMGKGGYKRAILRFKATASRTRIMFLSTYYHTRSDDFVSLCGPVVDDVTLLSVRTHRRVL

SEQ ID NO: 2070 - protein, 306 aa, Triticum aestivum
MEAAASNPSSKRIALVTGGNKGVGLETCRQLASKGLKVVLTARNAARGLEAVEDVRRSGADAVFHQLDVTDPNSVARLADFVRDQFGKLDILINNAGISGVDRDPVLVAKVKEQVESMDVDQRVQWMKENSKETYEEAKECMRTNYYGAKLVTEALLPLLQLSSSGRIVNVSSGFSLLRNFNSEELKNEFNDVDNLTEKRLEELLDSFLEDFKANLIEAHGWPTGGSSAYKVAKAALNAYTRILAKKYPRMRINCLTPGYVKSDMSMHMGVLTPEEGASNPVKVALLPDDGPTGAYFDRDGVASFV

SEQ ID NO: 2071 - protein, 474 aa, Triticum aestivum
MAASSAPLAFSASASALSARLRLAAPAASCAATTRRRRPVVVRAKIREIFMPALSSTMTEGKIVSWAAAEGDRVAKGDAVVVVESDKADMDVETFYDGIVAVVLVPAGESAPVGAPIALLAESEEDVALAVAQAQALSSGQPQQEAPALSDAAASPPPPAAPVAAAPAPVAAGTKGVATPQAKKLAKQHRVDLAKVTGTGQFGRITPADVEAAAGIQPKPKVAPTPAAAAPVAAASSVRAVPQAAVLPPVPGATVVPFTAMQAAVSKNMVESLSVPAFRVGYPILTDKLDALYEKVKPKGVTMTVLLAKAAAMALAQHPVVNASCRDGTSFTYNSSINIAVAVSIDGGLITPVLEQADKLDIYLLSQKWKELVKKARAKQLQPNEYNSGTFTLSNLGMFGVDRFDAILPPGQGAIMAVGASKSTVAADKDGFFSVKSKMMVNVTADHRIVYGADLAAFLQTFAKIIEDPESLTL

SEQ ID NO: 2072 - protein, 268 aa, Triticum aestivum
MAQLPPKIPTAATGAHHWPGAGVEHHGHGPVAVWADEFAEFAAARRGAHRRSLSDSVAFVEMAPGGCGGAGDFDRLDDDQLMSMFPDEGGSTAPGSENGTSDSDGDKHGKDRYDDGHNDDANPEEPGPGHATPTSSTETIRDPKRVKRILANRQSAQRSRVRKLQYISELERCVTTLQNEVSVLSPRVAFLDQQRTILTVGNSHLKQRIAALAQDKLFKDAHQEALKEEIERLRQVYQQQNLRMSSGAGAASDHGGPPPVRAEKELMS

SEQ ID NO: 2073 - protein, 492 aa, Hordeum vulgare
MDQPPNGFAAGGLFVQHIDGQNASPPSVIVIGGGISGIASARALSNASFKVTLLESRERLGGRVHTDYSFGCPIDMGASWLHGVCNENSLAPLIRLLGLRLYRTSGDNSVLYDHDLESYALFDKDGRQIPQEIVTKVGEIFEQILKETVKVRDEYANDMPLVQAISMVLDRNPHLKLEGLQYEVLQWCICRLEAWFATDVDNISLKNWDQEHVLTGGHGLMVNGYDPVIKALSRDLDVHLNHRVTKIIQRYNKVIVCVEDGTSFVADAAIITVPLGVLKANIIKFEPELPDWKLSAISDLGVGLENKIALRFNTIFWPNVEVLGRVAQTSNACGYFLNLHKATGHPVLVCMVAGRFAYEMEKLSDEESVNFVMSQLRRMLPGATEPVQYLVSRWGTDPNSLGSYSCDLVGKPADLYERFCAPVGNMFFAGEAACIDHSGSVHGAYSSGIDAAEDCRRRLSTQLGISDLFQVGKIVMREDMTEVMVPLQISRL

SEQ ID NO: 2074 - protein, 259 aa, Oryza sativa
MEGGGGGGGAPYATRTAEEVFRDLRGRRAGMIKALTTDVEKFYKLCDPEKENLCLYGYPNETWEVTLPAEEVPPEIPEPALGINFARDGMNEKDWLALVAVHSDSWLLSVAFYFGARFGFDREARRRLFNMINNLPTIFEVVTGAAKKQAKEKTPNSSSKSNKPSSKVQSKAESRSKSKLSAPKDEEGSGDDEGEEEEDDHDNTLCGTCGTNDGKDEFWICCDNCEKWYHGKCVKITPARAEHIKQYKCPDCTNKRTRA

SEQ ID NO: 2075 - protein, 875 aa, Phaseolus vulgaris
MPQGNAAAAAALLDNGGDAGDAVMARWLQSAGLQHLASPLASTAIDHRLLPNLLMQGYGAQSAEEKQRLLKLMRNLNFNGESASEPYTPTAQSLGGVAGSDGFFSPEFRGDFGAGLLDLHAMDDTELLSEHVVSEPFEPSPFMPGDARVFEDDFNPINCKLESGEADADASISLPMNEKEYSTRENNVAKIRVVVRKRPLNKKELAKKEDDIVTVSDNAYLTVHEPKLKVDLTAYVEKHEFCFDAVLDEHVTNDEVYRTTVEPIIPTIFERTKATCFAYGQTGSGKTYTMQPLPLRAAEDLVWQLHQPVYRNQRFKLWLSYFEIYGGKLYDLLSDRKKLCMREDGRQQVCIVGLQEFEVCDVEIVKEFIERGNAARSTGSTGANEESSRSHAILQLVVKKHSEVKESKRNNDGNEARSGKVVGKISFIDLAGSERGADTTDNDRQTRIEGAEINKSLLALKECIRALDNDQIHIPFRGSKLTEVLRDSFVGNSKTVMISCISPGAGSCEHTLNTLRYADRVKSLSKSGNPRKDQVPNPAPQTNKEISSTSSIPASASAEDFNYQRQEKTMDIGRKFVERENSSYSSAATAADKQPLSFSSNYLSNGREEKGLPSASLDRERFEPKNSYGDTTSQKMNSYSQIDTGEKLQKVSPPRRKGSKDEKSERPANWMKRDANGSDTFTTNSKQQSTGNYNTVSKDEKSDRPSNWMKRDSSSSDLFTTSSKQQSTGNYAPKDEKSERPANWMKRDASNSDIFSTSLKQPSTGNYNNVTTGSRPYEAESSPNGNINAVLEEEEALIAAHRKEIEDTMEIVREEMKLLAEVDQPGSLIDNYVTQLSFVLSRKAASLVGLQARLARFQHRLKEQEILSRKRVPRQ

SEQ ID NO: 2076 - protein, 756 aa, Glycine max
MADYFSGSVEFGLNLSKRIYYGKGSAPSPAPAMSRSLSKSPEGYLPTAPMCYAVISDPEKVENPDIRSYQPYVLGQCEPPALIPLELHGVAMEVECSLDTAFVTVTGKWRVHCVTASSTCDCQVAIPIGEEGSLLGLEVDGSGRSYHTELISLKDEKDKNKVAKTKDGYFLKSHIYTVKIPQFRGGSVFSIKIRWSQKILFHDGQLSLCVPFSFPSYVNPAGRNISKKEKIFLKVNSGATTEVLCKTTSHPFKELLRQAGKLNLSYEAEVLTWSSTDLSFSYSVSSNDIFGAVLLQSPFLRDFDEREIFCLYLYPGNSPDRKVFKKDVVFVVDISASMKGTPLDNTKNSLLTSLSQLNAQDTFNIIAFNGAVYLFSSSMERATEEAILNATTWVDTNFIANGDTNIVLPLTQAMKLLEKSTDSVPLIFLVTDGAVEDERDICNFVKSYVSSGQSFRTPRIYTFGIGLYCNHYFLQMLAQIGRGHYDSAHDLDSIDFRMQRLFSSASSVMVADITIKSLEGLDSLELFPTHIQDISFESPLILSGRYSGTFPELVKVTGTLADMTNFVVDLKVKREKDMQLSNVLSKRHIDQVTAQAWLLKSKELEEKVTKMSIQNKVPSEYTCMNIVLVQSDEGKKAPEQFLLQKAYNKLSFQKLELNNQNLFLGGLNLGFGDLKATAENLPPAIKEAKPPEGLLGKAASNCCGRLADTCCGMCLLQTCTFVNDQCTIVCTQICAALACFELIKCCVELCDCDCLQ

SEQ ID NO: 2077 - protein, 562 aa, Glycine max
MGSVSSEDGSDRCGSYSLSADVSESESCSSFSARRFDAEGASSSANLSPRPVAAHFNFPPAQVMLPVIGGKDVVVWDHKRDLDLSEVEMMKERFAKLLLGEDMSGGGKGVCTALAISNAITNLSATVFGELWRLEPLAPQKKTMWRREMEWLLCVSDSIVELVPSVQQFPGGGTYEVMATRPRSDLYINLPALKKLDGMLLNMLDGFHDTQFWYVDRGIILGDSKDCDAYGRPSVRQEEKWWLPSPKLPPNGLSEESRKRLQQCRDCTNQILKAAVAINTSVLAEMEIPGAYIESLPKNGKACLGDIIYRYITADQFSPECLLDCLDLSTEHHTLDIANRIEAAIHVWRLKDHKKHLSSAKSRRSWGGKVKGLVADGEKNKNNFLAQRAETLLESLKHRFPGLPQTALDMAKIQYNKDVGQSILESYSRVMESLAFNIMARIDDVLYVDDSIKRCAAADSLSLFSRGGFGGMPIQKRFSPSPFSIQHTPYASPFATPTFCSSTPVTGSPCSPARIHDVKRNAPKEGADSKTEKLATSEFERVWSYAGNLSARRASGDAPERD

SEQ ID NO: 2078 - protein, 566 aa, Phaseolus vulgaris
MGSVSSEDGSDQQSDRCGSYSLSADVSESESCGSFSARRFDAEGASSSANLSPRPVASHFNFPPPQVMLPVIGGKDVVVWDHKRDLDLTEVEMMKERFAKLLLGEDMSGGGKGVCTALAISNAITNLSATVFGELWRLEPLALQKKAMWRREMEWLLCVSDSIVELVPSVQQFPGGGTYEVMATRPRSDLYINLPALKKLDGMLLSMLDGFHDTQFWYVERGIILGDSKDCDAYGRPSVRQEEKWWLPSPKLPPNGLSEENRKRLQQCRDCTNQILKAAVAINTSVIAEMEIPGAYVESLPKNGKACLGDIIYRYITADQFSSECLLDCLDLSSEHHTLDIANRIEAAIHVWRLKDHKKHLSSAKARRSWGGKVKGLVADSEKNKNHFLAQRAETLLESLKHRFPGLPQTALDMAKIQYNKDVGQSILESYSRVMESLAFNIMARIDDVLYVDDSIKRCAAADSLSLFSRGGFGGMPIQKRFSPSPFSIQHTPYASPFATPTFCSSSPVTGSPCSPARIHDTKRNAPKEGADSKADKLAKSEFERVWSYAGNLSARRASGDAPERD

SEQ ID NO: 2079 - protein, 562 aa, Cajanus cajan
MGSVSSEDASDRCGSYSLSADVSESESCSSFSARRFDAEGASSSANLSPRPLAAHFNFPPPQVMLPVIGGKDVVVWDHKRHLDLSEVEMMKERFAKLLLGEDMSGGGKGVCTALAISNAITNLSATVFGEMWRLEPLAPQKKAMWRREMEWLLCVSDSIVELVPSVQQFPGGGTYEVMATRPRSDLYINLPALKKLDGMLLSMLEGFHDTQFWYVDRGIILGDSKDCDAYGRPSVRQEEKWWLPSPKLPPNGLSEENRKRLQQCRDCTNQILKAAVAINSSVLAEMEIPRAYIESLPKNGKACLGDIIYRYITADQFSPECLFDCLDLSSEHHTLDIANRIEAAIHVWRLKDQKKHESSAKSRRSWGGKVKGLVADGHSEKNHFLAQRAETLLENLKHRFPGLPQTALDMAKIQYNKDVGQSILESYSRVMESLAFNIMARIDDVLYVDDSIKRCAAADSLSLFSRGGFGGMPIQKRFSPSPFPIQHTPYASPFATPSFCSSSPVTGSPCSPGRIHDVKRNARKEGADSKAEKLATSEFERVWSCAGNLSATRASGDAPERD

SEQ ID NO: 2080 - protein, 557 aa, Lotus japonicus
MGSVSSEEGSDRCGSYSLSADVSESESCSSFRRFDAEGASSSANLSPPPLAASHFNFPPPQVMLPVIGGKDVVVWDHKRDLDLSEVEMMKERFAKLLLGEDMSGGGKGVCTALAISNAITNLSATVFGELWRLEPLAPQKKAMWRREMEWLLCVSDSIVELVPSVQQFPGGGTYEVMATRPRSDLYINLPALKKLDGMLLSMLEGFHDTQFWYVDRGIILGDSKDCDEYGRPSVRQEEKWWLPSPKLPPNGLCEDDRKKLQQCRDCTNQILKAAMAINSSVLAEMEIPGAYVESLPKNGKACLGDIIYRYISADQFSSECLLDCLDLSSEHHTLDIVNRIEAAVNVWRLKDHKKHLSSVKARRSWSGKVKGLVADGEKHHFLSQRAETLLQSLKHRFPGLPQTALDMAKIQYNKDVGQAILESYSRVMESLAFNIMARIDDVLYADDTVKRCAAADSIPLFSRGGFGGLPMQKRMSPSPFSIQHSPYASPFATPSFCSSSPVSGSPCSPRRTRAVKKNAQATESKTEKLAAADFERVWSYTGNLSARRATGDAPERD

SEQ ID NO: 2081 - protein, 568 aa, Lupinus angustifolius
MGSVSSEDGSDQQSERCGSYSVSADISESESSTSFCGGRRFETEGASTSANLTPLPLLAHFNFPAAQVMIPVIGGKDVVIWDHNREKRDVDLSEVEMMKERFAKLLLGEDMSGGGKGVCTALAISNAITNLSATVFGELWRLEPLAPQKKAMWRREMEWLLCVSDSIVELVPSVQQFPGGGTYEIMAMRPRSDLYINLPALKKLDGMLLGMLDGFEDTQFWYVDKGIILGDKDCDDYSGRPSVRQEEKWWLPSPKLPPNGLFEDDRKRLQQCRDCTNQILKAAMAINSSVLAEMEIPRAYIGSLPKNGKACLGDIIYRYITADQFSPECLLDCLDLSSEHHTLDIANRIEAAVHVWRLKDSKKHSNSVKARRSWSGKVKGLVADSERSHFLSQRADTLLQSLKHRFPGLPQTALDMAKIQYNKDVGQSILESYSRVMESLAFNIIARIDDVLYVDDTIKRCAAADSIPLFSKGGFGGMPIQKRISPSSFSIQHTPYASPFATPSFCSSSPVTGSPCSPQRTPSVKRNGRKEATYSKSEKLASTDFERTWSFTGNLSARRVSGDAPERD

SEQ ID NO: 2082 - protein, 556 aa, Trifolium pratense
MASVSSEEEVSERCGSYSPSADISESESCSSFCGRRFDAEGASSSANLSPRQLAAHFNLPTAAQVMLPVIGGKDVAVWDHKRDLDLSEVEMMKERFAKLLLGEDMSGGGKGVCTALAISNAITNLSATVFGELWRLEPLAPQKKAMWRREMDWLLCVSDSIVELVPSVQQFPGGGTYEVMATRPRSDLYVNLPALKKLDGMLLSMLDGFCDTQFWYVDRGIVLGDSKDCDEYDRPSVRQEEKWWLPSPKLPPNGLCEDDRKRLQQCRDCTNQILKAAMAINSSVLAEMEIPAAYVESLPRNGKACLGDIIYRYITAAQFSSECLLDCLDLSSEHHTQDIANRIEAAIHVWKLKDDKKVKNSVKARRSWGGKVKSLVADGDKNHFLAQRAETLLQNLKHRFPGLPQTALDMAKIQYNKDVGQSILESYSRVMESLAFNIMARIDDVLYVDDSIKRCAAADSILFGRGGFGGRPIQKRMSPSPFSIQHTPYASPFGTPSSSPASGSSCSPRRTHAVKRNTKGKDSKTGKFSPADFEKVWSYTGNLNVRRVSGEAPERN

SEQ ID NO: 2083 - protein, 574 aa, Citrus sinensis
MGSVSSDDDVSDQQSERCGSYSLSADVSESESCSSSSFSGRRFDAEGASSSMTSSPRPVARGFGFPVPVMVPVIGGKDVVVWDEKPEKSDTDLSEVEMMKERFAKLLLGEDMSGGGKGVCTALAISNAITNLSATVFGELWRLEPLAPQKKAMWRREMQWLLCVSDSIVELVPSIQQFPGGGTYEVMATRPRSDLYMNLPALKKLDAMLIGMLDGFCETEFWYVDRGIVVGDGGDRDAFSSMVPSGRPSVRHEEKWWLPCPKVPQNGLSEDVRKKLQQCRDCTNQILKAAMAINSSVLAEMEIPAAYLETLPKNGKACLGDIIYRYITADQFSPECLLDCLDLSSEHHTLEVANRIEAAVHVWKQKDQRKHLSHSKSRRSSWGGKVKGLVADSEKNHSLAHRAETLLHSLRLRFPGLPQTALDMNKIQYNKDVGQSILESYSRVMESLAFNIMARIDDVLFVDDATKRCAAAESISLFSRGGLSGLPIQKRMSPSPFSIQHTPYASPFGTPTFCSSTPVGGSPGRVPTAQKRSSLKEAPPRKLEKPCPAEFERVWSYAGNLSSRRVSGDAPERD

SEQ ID NO: 2084 - protein, 573 aa, Theobroma cacao
MGSVSSDDGSDQQSVRCGSYSLSADVSESESCSSFSCRRFDGEGCSSSMTSSPRLLAAGGFGFQVPVMLPVIGGKDVVIWDDEKPEKRDNNLSEVELMKERFAKLLLGEDMSGGGKGVCTALAISNAITNLSATVFGELWRLEPLAPQKKAMWRREMEWLLCVSDSIVELVPSIQQFPGGGTYEVMATRPRSDLYINLPALKKLDAMLISMLDGFLETEFWYVDRGIVVGDGGDCDAYPSSVSGGRPSIRQEEKWWLPCPKVPPNGLSEDARKKLQQCRDCTNQILKAAMAINSSVLAEMEIPTAYLETLPKNGKACLGDIIYRYVTADQFSPECLLDCLDLSTEHHTLEIANRIEAAVHVWKQKDHRKHMTHGKVRRSSWGGKVKGLVADNEKNNFLAQRAETLLHSLRLRFPGLPQTALDMNKIQYNKDVGQSILESYSRVMESLAFNIMARIDDVLYVDDAIKRCAAAETISLFSRSSLSGLPIQKRMSPSPFSIQHSPYASPFATPTFCSSTPLTGSPGRAASSLKRNGLKEEPDWKLEKAYGAEFERVWSYTGSLSARRISENAPERD

SEQ ID NO: 2085 - protein, 574 aa, Citrus clementina
MGSVSSDDDVSDQQSERCGSYSLSADVSESESCSSSSFSGRRFDAEGASSSMTSSPRPVARGFGFPVPVMVPVIGGKDVVVWDEKPEKSDTDLSEVEMMKERFAKLLLGEDMSGGGKGVCTALAISNAITNLSATVFGELWRLEPLAPQKKAMWRREMQWLLCVSDSIVELVPSIQQFPGGGTYEVMATRPRSDLYMNLPALKKLDAMLIGMLDGFCETEFWYVDRGIVVGDGGDRDAFSSMVPSGRPSVRHEEKWWLPCPKVPQNGLSEDVRKKLQQCRDCTNQILKAAMAINSSVLAEMEIPAAYLETLPKNGKACLGDIIYRYITADQFSPECLLDCLDLSSEHHTLEVANRIEAAVHVWKQKDQRKHLSHSKSRHSSWGGKVKGLVADSEKNHSLAHRAETLLHSLRLRFPGLPQTALDMNKIQYNKDVGQSILESYSRVMESLAFNIMARIDDVLFVDDATKRCAAAESISLFSRGGLSGLPIQKRMSPSPFSIQHTPYASPFGTPTFCSSTPVGGSPGRVPTAQKRSSLKEAPPRKLEKPCPAEFERVWSYAGNLSSRRVSGDAPERD

SEQ ID NO: 2086 - protein, 529 aa, Triticum aestivum
MAGGFAGVEAGGGRAEQYEGRITPYFILACIVGSFGGSLFGYDLGVSSGVTSMDDFLIKFFPDVYNRKHAHLHETDYCKYDNQVLTLFTSSLYFAGLVSTFGASYVTKRHGRRGSIMVGAVSFFLGGAVNAAAVNVAMLIVGRVLLGVGIGFGNQAVPLYLSEIAPFKIRGAVNQLFQLTTCLGILVANVINYFTDRIHPWGWRLSLGLAVVPATAIFVGALFLPETPNSLVERGRLEEARRVLEKVRGTHKVDAEFEDLKEASEAARAVRGTFRNLLAVRNRPQLIIGALGIPAFQQLSGMNSILFYSPVIFQSLGFGSSAALYSSIITGSMLVVGALVSMLVVDRLGRRVLFIEAGAQMIASMVVVATILALKFGHGEELSKGVSTVLVVAICLFVVAYGWSWGPLGWLVPSELFPLEMRSAGQSVVVCVNLFWTAAVAQCFLAAMCHLRWGVFILFAALIVVMSIFVILLLPETKQVPIEEIWLLFDKHWYWKRVVTKDPKYQGHHQRQEMAAAAAGAVKPVGTSE

SEQ ID NO: 2087 - protein, 528 aa, Secale cereale
MAGGFAGVEAGGGRAEQYEGRITPYFILACIVGSFGGSLFGYDLGVSSGVTSMDDFLIKFFPDVYDRKHAHLHETDYCKYDNQVLTLFTSSLYFAGLVSTFGASYVTKHHGRRGSIMVGAVSFFLGGAVNAAAVNVAMLIVGRVLLGVGIGFGNQAVPLYLSEIAPFKIRGAVNQLFQLTTCLGILVANVINYFTDRIHPWGWRLSLGLAVVPATAIFVGALFLPETPNSLVERGRLEEARRVLEKVRGTHKVDAEFEDLKEASEAARAVRGTFRNLLAVRNRPQLIIGALGIPAFQQLSGMNSILFYSPVIFQSLGFGSSAALYSSIITGSMLVVGALISMVVVDRLGRRVLFIEAGAQMIVSMVVVATILALKFGHGEELSKGVSTVLVVAICAFVVAYGWSWGPLGWLVPSELFPLEMRSAGQSVVVCVNLFWTAAVAQCFLAAMCHLRWGVFILFAALIVVMSIFVILLLPETKQVPIEEIWLLFDKHWYWKRVVTRDPKYQGHHQRQEMAAAAAAVKPVVTSE

SEQ ID NO: 2088 - protein, 529 aa, Triticum aestivum
MAGGFAGVEAGGGRAEQYEGRITPYFILACIVGSFGGSLFGYDLGVSSGVTSMDDFLIKFFPDVYNRKHAHLHETDYCKYDNQVLTLFTSSLYFAGLVSTFGASYVTKRHGRRGSIMVGAVSFFLGGAVNAAAVNVAMLIVGRVLLGVGIGFGNQAVPLYLSEIAPFRIRGAVNQLFQLTTCLGILVANVINYFTDRIHPWGWRLSLGLAVVPATAIFVGALFLPETPNSLVERGRLEEARRVLEKVRGTHKVDAEFEDLKEASEAARAVRGTFRNLLAVRNRPQLIIGALGIPAFQQLSGMNSILFYSPVIFQSLGFGSSAALYSSIITGSMLVVGALVSMVVVDRLGRRVLFMEAGAQMIASMVVVATILALKFGHGEELSKGVSTVLVVAICLFVVAYGWSWGPLGWLVPSELFPLEMRSAGQSVVVCVNLFWTAAVAQCFLAAMCHLRWGVFILFAALIVVMSVFVVLLLPETKQVPIEEIWLLFDKHWYWKRVVTKDPKYQGHHHRQEMAAAAAGAVKPVVTSE

SEQ ID NO: 2089 - protein, 531 aa, Brachypodium distachyon
MAGGFGGGEAVAGRAEQYEGKITGYFILACIVGSFGGSLFGYDLGVSSGVTSMDDFLLKFFPDVYARKHAHLRETDYCKYDNQVLTLFTSSLYFAGLVSTFGASYVTKRHGRRASIMVGAVSFFLGGAVNAAAQNVAMLIVGRVLLGAGIGFGNQAVPLYLSEIAPYKIRGAVNQLFQLTTCLGILVADVINYFTDRIHPWGWRLSLGLAMGPATAIFVGALFLPETPNSLVERGKLEEARRVLEKVRGTHKVDAEFEDLKEASEAARAVKGTFRNLLAVRNRPQLIIGALGIPAFQQLSGMNSILFYSPVIFQSLGFGSSAALYSSIITGSMLVAGALISMVVVDRLGRRFLFIEAGIQMIASMVVVAVILALKFGHGEEISKGVGTVLVVAICMFVVAYGWSWGPLGWLVPSELFPLEMRSAGQSVVVCVNLFWTAAVAQCFLAAMCHLRWGVFVLFAALIVVMSVFVILLLPETKQVPIEEIWMLFDKHWYWKRVVTKDPKYQGHTRHQRQEMAAASASTVKPVSSDA

SEQ ID NO: 2090 - protein, 530 aa, Oryza sativa
MAGGFGGGGGEAIAGRAEQYEGKITGYFILACIVGSFGGSLFGYDLGVSSGVTAMDDFLIKFFPEVYARKSAHLHETDYCKYDNQVLTLFTSSLYFAGLVSTFAASHLTRRRGRRATIMVGAVSFFLGGAVNAAAANVAMLIAGRLLLGVGIGFGNQAVPLYLSEIAPYNIRGAVNQLFQLTTCLGILVADVINYFTDKIHPWGWRLSLGLAMGPATAIFVGALFLPETPNSLVEMGRLEEARRVLEKVRGTRKVDAEFEDLREASEAARAVRGTFRSLLAARNRPQLIIGALGIPAFQQLSGMNSILFYSPVIFQSLGFGNSAALYSSIITGSMLVVGALVSMVVVDRLGRRFLFIEAGIQMISSMVVVAVILALKFGHGEELSKGVGTVLVVAICLFVVAYGWSWGPLGWLVPSELFPLEMRSAGQSVVVCVNLFWTAAVAQCFLAAMCHLRWGVFILFAALIVVMSIFVILLLPETKQVPIEEIWMLFDKHWYWKRIVRKDPKYQGHHHHQMAAMPTAAAKSGSSEV

SEQ ID NO: 2091 - protein, 518 aa, Setaria italica
MAGGFGGGGAATGRAELYEGKITGYFILACIVGSFGGSLFGYDLGVSSGVTSMDDFLKKFFPDVYQRKQAHLHETDYCKYDNQVLTLFTSSLYFAGLVSTFGASYVTKRHGRRASIMVGATSFFLGGAINAAAMNIAMLIVGRVLLGVGIGFGNQAVPLYLSEIAPYRIRGAVNQLFQLTTCLGILVADVINYFTDRLHPWGWRLSLGLAMGPATAIFVGALFLPETPNSLVERGHLEEARRVLEKVRGTHKVDAEFEDLKEASEAARAVKGTFRNLLATRNRPQLIIGALGIPAFQQLSGMNSILFYSPVIFQSLGFGNSAALYSSIITGSMLVVGALVSMVTVDRLGRRFLFIEAGVQMIASMVVVAVILALKFGHGEDLTKGVSTVLVVAICLFVVAYGWSWGPLGWLVPSELFPLEMRSAGQSVVVCVNLFWTAAVAQCFLAALCHLRWGVFVLFASLIVVMSIFVILLLPETKQVPIEEIWMLFDRHWYWKRIVRKDPKYPGNLHEQQEMARA

SEQ ID NO: 2092 - protein, 446 aa, Gossypium raimondii
MNRVVVLLLLLWFLCFSSVFWMTSASVVLIGNNVTLSFDDIEANFAPAIKGSGECGVLYLANPLDACSDLSIKVDELSNGSSPFALVIRGGCSFEEKVRRVQKAGFEAAIVYDNDDDGVLVAMAGNAAGIKIHAVFVSKASGEILKKFAGSTDMELWLIPSFENSAWSIMAISFISLLAMSAVLATCFFVRRHRIRRELPQSSRVREFHGMSRRLVKAMPSLIFTAVLEDNCTSITCAICLEDYTVGEKLRILPCRHKFHAFCVDSWLTTWRTFCPVCKRDARTSTGDPPASESTPLLSSTLSTMSSSALSSVRSSLASSSAIQIAPALSRSPSIAHTHSLASNPYIQQSLRSYRQSPMSFSRSSVDLRNASSQRSRASHLVSPASLNYPSISPLNARYISPYFPSPSNASPSIVSSSGHLLHPLHYSESATSFSPFASAQSLPDC

SEQ ID NO: 2093 - protein, 446 aa, Gossypium hirsutum
MNRVVVLLLLSWFLCFSSVFWMTSASVVLIGNNVTLSFDDIEANFAPAIKGSGECGVLYLANPLDACSDLSIKVDELSNGSSPFALVIRGGCSFEEKVRRVQKAGFEAAIVYDNDDDGVLVAMAGNAAGIKIHAVFVSKASGEILKKFAGSTDMELWLIPSFENSAWSIMAISFISLLAMSAVLATCFFVRRHRIRRELPQSSRVREFHGMSRRLVKAMPSLIFTAVLEDNCTSITCAICLEDYTVGEKLRILPCRHKFHAFCVDSWLTTWRTFCPVCKRDARTSTGDPPASESTPLLSSTLSTMSSSALSSVRSSLASSSAIQIAPAVSRSPSVAHTHSLASNPYIQQSLRSYRQSPMSFSRSSVDLRNASSQRSRASHLVSPASLNYPSISPLNARYISPYFPSPSNASPSIVSSSGHPLHPLHYSESAASFSPFASAQSLPDC

SEQ ID NO: 2094 - protein, 446 aa, Theobroma cacao
MNRVVVLLLLWFLCLLSASWMTSASVVLIGKNVTLSFDDIEANFAPAIEGSGECGVLYLAEPLDACSDLSNKVEEVSNVTSPFALVIRGRCSFDEKVRRVQKAGFKAAIVYDNDDDGILVAMAGTAAGIKINAVFVSKASGEILKKYAGCTDTELWLIPSFENSAWSIMAISFISLLAMSAVLATCFFVRRHRIRRERPQSSRVREFHGMSRRLVKAMPSLVFTAVLEDNCTSRTCAICLEDYTVGEKLRILPCRHKFHAFCVDSWLTTWRTFCPVCKRDARTSTGDPPASESTPLLSSIPSSVSSSVLSSARSSLASSSAIQIAPASSWCPSVSHIHPLASTPYVQQSLRSCHQSPSISLSRSSVDLRNTSSQRSHASHLVSPASLNYPSISPLNARYMSPYFPSPSNASPSLVSSSGHQLHPLRCSESAASFSPFASAQSLPEC

SEQ ID NO: 2095 - protein, 340 aa, Theobroma cacao
MGEMSSFQLGVIGALFLSVASSVSIVICNKALMSNLGFPFATTLTSWHLMVTFCTLHAAQRFNLFENKSIDMKTVMLFGILNGVSIGLLNLSLGFNSIGFYQMTKLAIIPFTVLLETVFLKKQFSQKIRLSLFVLLVGVGIASITDLQLNLVGTILSLLAIITTCVGQILTNTIQKRLNVSSTQLLYQSAPFQAAILFVSGPLVDQCLTKQNVFAYKYSPIVLAFIILSCVISVSVNFSTFLVIGKTSPVTYQVLGHLKTCLVLGFGYTLLHDPFTDRNIIGILIAIFGMGLYSYFCTQENKKKQADPLASQMKDKDATPFLAMEKEGHEVKKSDKDSLV

SEQ ID NO: 2096 - protein, 340 aa, Pteridium aquilinum
MGEMSSFQLGVIGALFLSVASSVSIVICNKALMSNLGFPFATTLTSWHLMVTFCTLHAAQRFNLFENKSIDMKTVMLFGILNGVSIGLLNLSLGFNSIGFYQMTKLAIIPFTVLLETVFLKKQFSQKIRLSLFVLLVGVGIASITDLQLNLVGTILSLLAIITTCVGQILTNTIQKRLNVSSTQLLYQSAPFQAAILFVSGPLVDQCLTKQNVFAYKYCPIVLAFIILSCVISVSVNFSTFLVIGKTSPVTYQVLGHLKTCLVLGFGYTLLHDPFTDRNIIGILIAIFGMGLYSYFCTQENKKKQADPLASQMKDKDATPFLAMEKEGHEVKKSDKDSLV

SEQ ID NO: 2097 - protein, 340 aa, Gossypium raimondii
MGEMSSFQLGVIGALFLSVASSVSIVICNKALMSNLGFPFATTLTSWHLMVTFCTLHAAQRFNLFESKPIDMKTVMLFGILNGVSIGLLNLSLGFNSIGFYQMTKLAIIPFTVLLETIFLKKQFSQKIKMSLFVLLVGVGIASITDLQLNFVGTILSLLAIVTTCVGQILTNTIQKRLNVSSTQLLYQSAPFQAAILFVSGPLVDQFLTKQNVFAFKYSSIVSAFIILSCIISVSVNFSTFLVIGKTSPVTYQVLGHLKTCLVLTFGYTLLHDPFTERNIIGILIAIFGMVLYSYFCTQENKKKQADPLVSQMKDKEGAPFLGLEKEGQEDKNADKDSHV

SEQ ID NO: 2098 - protein, 340 aa, Gossypium hirsutum
MGEMSSFQLGVIGALFLSVASSVSIVICNKALMSNLGFPFATTLTSWHLMVTFCTLHAAQRFNLFESKPIDMKTVMLFGVLNGVSIGLLNLSLGFNSIGFYQMTKLAIIPFTVLLETIFLKKQFSQNIKLSLLLLLVGVGIASITDLQLNFVGTILSLLAIITTCVGQILTNTIQKRLNVSSTQLLYQSAPFQAAILFVSGPLVDQLLTKQNVFAYNYSPIVLAFIILSCIISVSVNFSTFLVIGKTSPVTYQVLGHLKTCLVLTFGYTLLHDPFTDRNIVGILIAIFGMGLYSYFCTQENKKKQADPLGSQMKEKDAAPFLGPQKEGHEVQNLNKDSVV

SEQ ID NO: 2099 - protein, 340 aa, Gossypium raimondii
MGEMSSFQLGVIGALFLSVASSVSIVICNKALMSNLGFPFATTLTSWHLMVTFCTLHAAQRFNLFESKPIDMKTVVLFGILNGVSIGLLNLSLGFNSIGFYQMTKLAIIPFTVLLETIFLKKQFSQNIKLSLLLLLVGVGIASITDLQLNFVGTILSLLAIITTCVGQILTNTIQKRLNVSSTQLLYQSAPFQAAILFVSGPLVDQLLTKQNVFAYNYSPIVLAFIILSCIISVSVNFSTFLVIGKTSPVTYQVLGHLKTCLVLTFGYTLLHDPFTDRNIVGILIAIFGMGLYSYFCTQENKKKQADPLGSQMKEKDAAPFLGPQKEGHEVQNLNKDSVV

SEQ ID NO: 2100 - protein, 340 aa, Gossypium hirsutum
MGEMSSFQLGVIGALFLSVASSVSIVICNKALMSNLGFPFATTLTSWHLMVTFCTLHAAQRFNLFESKPIDMKTVMLFGILNGVSIGLLNLSLGFNSIGFYQMTKLAIIPFTVLLETIFLKKQFSQKIKMSLLVLLVGVGIASITDLQLNSVGTILSLLAIVTTCVGQILTNTIQKRLNVSSTQLLYQSAPFQAASLFVSGPLVDQFLTKQNVFAFKYSSIVSAFIILSCIISVSVNFSTFLVIGKTSPVTYQVLGHLKTCLVLTFGYTLLHDPFTERNIIGILIAIFGMVLYSYFCTQENKKKQADPLVSQMKDKEGAPFLGLEKEGQEDKNADKDSHV

SEQ ID NO: 2101 - protein, 345 aa, Citrus clementina
MGEMSSFQLGVIGALFLSVASSVSIVICNKALMSNLGFPFATTLTSWHLMVTFCTLHAAQRLNFFESKAVDVKTVMLFGILNGISIGLLNLSLGFNSIGFYQMTKLAIIPFTVLLETLFLKKQFSQKIKFSLFLLLVGVGIASVTDLQLNMVGTILSLLAIVTTCVGQILTNTIQKRLNVSSTQLLYQSAPFQAAVLFVSGPLVDQFLTKQNVFAYKYSPVVLAFIILSCLIAVSVNFSTFLVIGKTSPVTYQVLGHLKTCLVLGFGYTLLHDPFTERNIIGILVAICGMGLYSYFCTQENKKKQSGDLSLSSQMKDHKETAALLAHHQEKEGHEVKKAAKDSIV

SEQ ID NO: 2102 - protein, 342 aa, Prunus mume
MGEMTGFQLGVIGALFLSVASSVSIVICNKALMSNLGFPFATTLTSWHLMVTFCTLHAAQRLNFFESKSIDMKTVMLFGILNGISIGLLNLSLGFNSIGFYQMTKLAIIPFTVLLETLFLKKQFSQKIKFSLFLLLVGVGIASVTDLQLNFVGTILSLLAIITTCVGQILTNTIQKRLNVSSTQLLYQSAPFQAAILFVSGPLVDQFLTKQNVFAHKYSSIVLVFIILSCLIAVSVNFSTFLVIGKTSPVTYQVLGHLKTCLVLGFGYTLLHDPFTYRNIIGILVAIFGMGLYSYFCLQENKKKQAGDLSLGSQIKDKDGIPLLSIDKDGHEVKKSTKNSLV

SEQ ID NO: 2103 - protein, 343 aa, Ricinus communis
MGEMTSFQLGVIGALFLSVASSVSIVICNKALMSNLGFPFATTLTSWHLMVTYCTLHCAQRFNLFESKPIDMKTVMLFGILNGVSIGLLNLSLGFNSIGFYQMTKLAIIPFTVLLETLFLKKQFSQNIKLSLFLLLVGVGIASVTDLQLNFLGTILSLLAIATTCVGQILTNTIQKRLNVSSTQLLYHSAPFQAAILFVSGPLVDQFLTKKNVFAYKYSPIVLAFIILSCLISVAVNFSTFMVIGKTSPVTYQVLGHLKTCLVLAFGYTLLHDPFTTRNIIGILVAIFGMGLYSYFCTQENKKKHSVDLSSVPQMKEKDSTPLLAMQDKETHEAKKSAKDSLV

SEQ ID NO: 2104 - protein, 342 aa, Prunus persica
MGEMTGFQLGVIGALFLSVASSVSIVICNKALMSNLGFPFATTLTSWHLMVTFCTLHAAQRLNFFESKSIDMKTVMLFGILNGISIGLLNLSLGFNSIGFYQMTKLAIIPFTVLLETLFLKKQFSQKIKFSLFLLLVGVGIASVTDLQLNFVGTILSLLAIITTCVGQILTNTIQKRLNVSSTQLLYQSAPFQAAILFVSGPLVDQYLTKQNVFAHKYSSIVLVFIILSCLIAVSVNFSTFLVIGKTSPVTYQVLGHLKTCLVLGFGYTLLHDPFTYRNIIGILVAIFGMGLYSYFCLQENKKKQAGDLSLGSQIKDKDGIPLLSIDKDGHEVKKSTKNSLV

SEQ ID NO: 2105 - protein, 344 aa, Populus trichocarpa
MGEMPSFQLGVIGALFLSVASSVSIVICNKALMSNLGFPFATTLTSWHLMVTFCTLHAAQRLNLFESKSIEMKPVMLFGILNGVSIGLLNLSLGFNSIGFYQMTKLAIIPFTVLLETLFLKKQFSQKIKLSLFVLLVGVGIASVTDLQLNFVGTILSLLAIITTCVGQILTSTIQKRLNVSSTQLLYQSAPFQAAILFVSGPLVDQFLTRKNVFAYKYSSLVLAFIILSCIISVSVNFSTFMVIGKTSPVTYQVLGHLKTCLVLGFGYTLLHDPFTMRNIIGILVAIFGMGLYSYFCVQENKKKQSVDLSLASQMKDKDSTPILGMQDKEISHDAKKSTKDSLV

SEQ ID NO: 2106 - protein, 348 aa, Vitis vinifera
MGEMSGFQLGVIGALFLSVASSVSIVICNKALMSNLGFPFATTLTSWHLMVTFCTLHVAQRFNVFESKSVDMKTVMLFGILNGVSIGLLNLSLGFNSIGFYQMTKLAIIPFTVLLETLFLKKQFSQKIKFSLFLLLVGVAIASVTDLQLNFVGTILSLLAIATTCVGQILTNTIQKRLNVSSTQLLYQSAPFQAAILFVSGPVVDQCLTKQNVFAYKYSPIVLAFIILSCIISVSVNFSTFLVIGKTSPVTYQVLGHLKTCLVLGFGYTLLHDPFTERNIIGILIAILGMGLYSYFCTHENKKKQLGDLSTVSQIKDRETAPLLAGKNMGYEDKESHEVKKATKDSLV

SEQ ID NO: 2107 - protein, 343 aa, Populus trichocarpa
MGEMSSFQLGVIGALFLSVASSVSIVICNKALMSNLGFPFATTLTSWHLIVTFCTLHAAQRFHLFDAKAIDMKTVMLFGILNGVSIGLLNLSLGFNSIGFYQMTKLAIIPFTVLLETLFLKKQFSQKIKLSLLVLLGGVAIASVTDLQLNFVGTILSLLAIVTTCVGQILTNTIQKRLNVSSTQLLYQSAPFQAAILFVSGPFVDHFLTKKNVFAYKYSSIVLAFIILSCIISVSVNFSTFMVIGKTSPVTYQVLGHLKTCLVLAFGYTLLHDPFTIRNIIGILVAIIGMGLYSYFCVQDNKKKQSVDLSLASQMKDKDSTPLLGMPDKEGHEAKKSTKVSLV

SEQ ID NO: 2108 - protein, 343 aa, Malus domestica
MGEMAGFQLGVIGALFLSVASSVSIVICNKALMSNLGFPFATTLTSWHLMVTFGTLHAAQRLKFFESKSIDMKTVMLFGILNGVSIGLLNLSLGFNSIGFYQMTKLAIIPFTVLLETLFLKKQFSQKIKFSLFLLVVGVGIASVTDLQLNFVGTILSLLAIVTTCVGQILTNTIQKRLNVSSTQLLYQSAPFQAAILFVSGPVVDQFLTKQNVFAHKYSSIVLVFIILSCLIAVSVNFSTFLVIGKTSPVTYQVLGHLKTCLVLGFGYTLLHDPFTERNIIGILVAIFGMGLYSYFCAQENKKKQAGGDLSLGSQIKDKDGTPLLIQDKDSHEVKKLTKNSLV

SEQ ID NO: 2109 - protein, 343 aa, Malus domestica
MGEMAGFQLGVIGALFLSVASSVSIVICNKALMSNLGFPFATTLTSWHLMVTFGTLHAAQRLKFFESKSIDMKTVMLFGILNGVSIGLLNLSLGFNSIGFYQMTKLAIIPFTVLLETLFLKKQFSQKIKFSLFLLVVGVGIASVTDLQLNFVGTILSLLAIVTTCVGQILTNTIQKRLNVSSTQLLYQSAPFQAAILFVSGPVVDQFLTKQNVFAHKYSSIVLVFIVLSCLIAVSVNFSTFLVIGKTSPVTYQVLGHLKTCLVLGFGYTLLHDPFTERNIIGILVAIFGMGLYSYFCAQENKKKQAGGDVSLGSPIKGKDGTPLLSQDNDTHEVKKSTKNSLV

SEQ ID NO: 2110 - protein, 343 aa, Manihot esculenta
MGEMSSFQLGVIGALFLSVASSVSIVICNKALMSNLGFPFATTLTSWHLMVTFCTLHCAQRFNLFESKPIDMKTVMLFGILNGVSIGLLNLSLGFNSIGFYQMTKLAIIPFTVLLETLFFKKYFSQNIKCSLFLLLIGVGIASVTDLQLNLVGTILSMLAIVTTCVGQILTNTIQKRLNVSSTQLLYQSAPFQAAILFVSGPLVDQFLTKKNVFAYKYSSIVLAFIILSCLISVAVNFSTFMVIGKTSPVTYQVLGHLKTSLVLGFGYTLLHDPFTLRNIIGIIIAIFGMGLYSYFCTQENKKKQSLDLSLGPQMKEKDNTPLIAMQDKESHETKKTAKDSLV

SEQ ID NO: 2111 - protein, 349 aa, Cajanus cajan
MGEMSNFQLGVIGALFLSVASSVSIVICNKALMSNLGFPFATTLTSWHLMVTFCTLHAAQRLNLFVSKSIDLKTVMLFGILNGVSIGFLNLSLGFNSIGFYQMTKLAIIPFTVLLETLFLKKQFSTKIKFSLFLLLVGVGIASITDLQLNFVGTILSLLAIITTCVGQILTNTIQKKLNVSSTQLLYQSAPFQAAILFVSGPVVDQMLTKQNVFAYKYSPVVLAFIILSCLIAVSVNFSTFLVIGKTSPVTYQVLGHLKTCLVLGFGYTLLHDPFTGRNIIGILVAIFGMGLYSYFCTEENKKKQLPSDLPLASQVKDKDSSPLLAGKNVGNQNDENHETKKLNKDSVI

SEQ ID NO: 2112 - protein, 339 aa, Manihot esculenta
MGEMSSFQLGVIGALFLSVASSVSIVICNKALMSNLGFPFATTLTSWHLMVTFFSLHCAHRFNMFESKSIDMKTVILFGILNGVSIGLLNLSLGFNSIGFYQMTKLAIIPFTVLLETLFLKKQFSQKIKFSLFLLLVGVGIASVTDLQLNFVGTILSMLAIVTTCVGQILTNTIQKRLNVSSTQLLYQSAPFQAAVLFVSGPLVDQFLTKKNVFAYKYSSIVLAFIILSCLISVAVNFSTFMVIGKTSPVTYQVLGHLKTCLVLAFGYTLLHDPFTVRNIIGILVAIFGMGLYSYFCTQENKKKQSVDLSLGPQMKEKDSTPLIAVQDKESHEAKKSLV

SEQ ID NO: 2113 - protein, 342 aa, Carica papaya
MGEMSSFQLGVIGALFLSVASSVSIVICNKALMSNLGFPFATTLTSWHLMVTFCTLHAAHRFNLFENKSIDLKTVVLFGILNGVSIGLLNLSLGFNSIGFYQMTKLAIIPFTVLLETIFLNKQFSQKIKLSLFLLLVGVGIASVTDLQLNFLGTVLSLLAIITTCVGQILTNTIQKKLNVSSTQLLYQSAPFQAAILFVSGPFVDKLLTKQNVFAYKYSPIVLAFIILSCVIAVSVNFSTFLVIGKTSPVTYQVLGHLKTCLVLAFGYTLLHDPFTPRNIIGILVAVFGMGLYSYFCNLDNKKKNSGADSGSQMKDKDETLLLLAQDKENQDANKANKDSLV

SEQ ID NO: 2114 - protein, 349 aa, Glycine max
MGEMSNFQLGVIGALFLSVASSVSIVICNKALMSNLGFPFATTLTSWHLMVTFCTLHAAQRLNLFVSKSVDLKTVMLFGILNGISIGFLNLSLGFNSIGFYQMTKLAIIPFTVLLETIFLKKQFSSKIKFSLSLLLVGVGIASITDLQLNFVGTILSLLAIITTCVGQILTNTIQKKLNVSSTQLLYQSAPFQAAILFVSGPLVDQMLTKQNVFAYKYSPVVLAFIILSCLIAVSVNFSTFLVIGKTSPVTYQVLGHLKTCLVLGFGYTLLHDPFTGRNILGILIAVFGMGLYSYFCTEENKKKQLASDLPLASQVKDKDSLPLLAGKNVGNQNEENHETKKLSKDSVI

SEQ ID NO: 2115 - protein, 348 aa, Lupinus angustifolius
MGEMSSIQLGVIGALFLSVASSVSIVICNKALMSNLGFPFATTLTSWHLMVTFCTLHVAQRFNLFEAKPIDMKTVMLFGILNGVSIGFLNLSLGFNSIGFYQMTKLAIIPFTVLFETIFLKKQFSSKIKFSLFLLLVGVGIASITDLQLNFLGTILSLLAIITTCVGQILTNTIQKKLNVSSTQLLYQSSPFQAAILFVSGPFVDQMLIKQNVFAFKYSPIVLGFIILSCLIAVSVNFSTFLVIGKTSPVTYQVLGHLKTCLVLAFGFTLLHDPFTERNLIGILVAIFGMGLYSYFCTNENKKKHSIDLPLASQVKDKENSPFLGGKNMGNQEKENHEPKKSSKESLV

SEQ ID NO: 2116 - protein, 345 aa, Helianthus annuus
MGELTGFQLGVIGALFLSVASSVSIVICNKALMSNLGFPFATTLTSWHLMVTYCTLHVAQRLNFFENKRIDMKTVILFGILNGVSIGFLNLSLGFNSIGFYQMTKLAIIPFTVLLETVFLKKQFSQKIKLSLFLLLLGVGIASVTDLQLNFVGTILSLLAIATTCVGQILTNTIQKRLNVSSTQLLFQSAPFQAAILFVTGPLVDQYLTKQNVFAFKYSPLVLGFIILSCVIAVSVNFSTFLVIGKTSPVTYQVLGHLKTCLVLGFGYTLLHDPFTEKNIIGILIAIVGMGLYSYFCTHENKKKQIVDLSPSSQIKDKDSNTPLLGHQEKENHFEAKKATKDSLV

SEQ ID NO: 2117 - protein, 346 aa, Trifolium pratense
MGEMTKVQLGVIGALFLSVASSVSIVICNKALMSNLGFPFATTLTSWHLMVTFCTLHVALRFNLFEAKPVDMKTVMLFGILNGVSIGFLNLSLGFNSIGFYQMTKLAIIPFTVMLETIFLKKQFSRNIKLSLFFLLVGVGIASITDLQLNFVGTILSLLAIITTCVGQILTNTIQKKLNVTSTQLLYQSAPFQAAILFVSGPLVDQMLTKQNVFAYKYSPIVLTFIIMSCVIAVSVNFSTFLVIGKTSPVTYQVLGHLKTCLVLGFGYTLLHDPFTERNIIGILVAVFGMGLYSYFCTQENKKKQLVDPPLSSQVKDKDDSPLLNGKNMDNKEKENHEKLSKDSLV

SEQ ID NO: 2118 - protein, 343 aa, Quercus alba
MGEMTSFQLGVVGALFLSVASSVSIVICNKALMSNLGFPFATTLTSWHLMVTFCTLHTAQRLNFFESKSIDTKTVMLFGILNGVSIGLLNLSLGFNSIGFYQMTKLAIIPFTVLLETLFLNKQFSRKIKFALFLLLVGVGIASVTDLQLNLVGTILSLLAIVTTCVGQILTNTIQKRLNVSSTQLLYQSAPFQAAILFVSGPLVDQFLTKQNVFAFKYSPLVLGFIVLSCLIAVSVNFSTFLVIGKTSPVTYQVLGHLKTCLILGFGYTLLHDPFTERNIIGILIAICGMGLYSFFCTQESKKKQSPDLSLVSQIKDKDTTQLLGHPDKESHEAKKSTKDSVV

SEQ ID NO: 2119 - protein, 345 aa, Centaurea maculosa
MGELTGYQLGVIGALFLSVASSVSIVICNKALMSNLGFPFATTLTSWHLMVTYCTLHVAHRFNFFENKSIDMKTVILFGILNGISIGFLNLSLGFNSIGFYQMTKLAIIPFTVLLETLFLKKQFSQKIKLSLFLLLVGVGIASVTDLQLNFVGTVLSLLAIMTTCVGQILTNTIQKRLNVSSTQLLYQSAPFQAAILFVTGPVVDQYLTKQNVFAYKYSPLVLGFIILSCVIAVSVNFSTFLVIGKTSPVTYQVLGHLKTCLVLGFGYTLLHDPFTERNIIGILVAIVGMGLYSYFCTHENKKKQVLDLSPGSQIKDKDSSAPLLGHQEKENHFEVKKATKDSLV

SEQ ID NO: 2120 - protein, 343 aa, Cirsium arvense
MGELTGYQLGVIGALFLSVASSVSIVICNKALMSNLGFPFATTLTSWHLMVTYCTLHVAHRMNFFDNKKIDMKTVILFGILNGVSIGFLNLSLGFNSIGFYQMTKLAIIPFTVLLETLFLKKQFSQKIKFSLFVLLVGVGIASVTDLQLNFIGTVLSLLAIATTCVGQILTNTIQKRLNVSSTQLLYQSAPFQAAILFVSGPLVDQYLTNQNVFAYKYSPIVLGFIIMSCLIAVSVNFSTFLVIGKTSPVTYQVLGHLKTCLVLGFGYTLLHDPFTERNIIGILVAIAGMGLYSYFCTLENKKKQMIDSSGSQIKDKDSSAPLLGHEEKGSFEVKNATKDSLV

SEQ ID NO: 2121 - protein, 346 aa, Trifolium pratense
MGEMSKVQLGVIGALFLSVASSVSIVICNKALMSNLGFPFATTLTSWHLMVTFCTLHVALRFNLFEAKPVDMKTVMLFGILNGVSIGFLNLSLGFNSIGFYQMTKLAIIPFTVMLETIFLKKQFSRNIKLSLFFLLIGVGIASITDLQLNFVGTILSLLAIITTCVGQILTNTIQKKLNVTSTQLLYQSAPFQAAILFVSGPFVDQMLTKQNVFAYKYSSIVLTFIIMSCVIAVSVNFSTFLVIGKTSPVTYQVLGHLKTCLVLGFGYTLLHDPFTERNIIGILVAVFGMGLYSYFCTQENKKKQSVDPPLSSQVKDKDDSPLLNGKNMDNKEKESHEKLSKDSLV

SEQ ID NO: 2122 - protein, 348 aa, Lupinus angustifolius
MGEMSSIQLGVIGALFLSVASSVSIVICNKALMSNLGFPFATTLTSWHLMVTFCTLHVAQRFNLFEAKPVDMKTVMLFGILNGVSIGFLNLSLGFNSIGFYQMTKLAIIPFTVMLETIFLKKQFSSKIKFSLFLLLVGVGIASITDLQLNFLGTILSLLAIITTCVGQILTNTIQKKLNVSSTQLLYQSSPFQAAILFVSGPFVDQMLTKQNVFAFKYSPIVLGFIILSCLIAVSVNFSTFLVIGKTSPVTYQVLGHLKTCLVLAFGFTLLHDPFTERNLIGILVAIFGMGLYSYFCTNENKKKHSIDLTLASQVKDKDNSPFLAGKNMGNQEKESHEPKKLSNESLV

SEQ ID NO: 2123 - protein, 349 aa, Medicago truncatula
MGEMSKTQLGVIGALFLSVASSVSIVICNKALMSNLGFPFATTLTSWHLMVTFCTLHVALRFNLFEAKPVDMKTVMLFGILNGVSIGFLNLSLGFNSIGFYQMTKLAIIPFTVMLETLFLKKQFSRNIKLSLFFLLVGVGIASITDLQLNFVGTILSLLAIITTCVGQILTNTIQKKLNVTSTQLLYQSAPFQAAILFVSGPLVDRMLTKQNVFAYKYSPLVLTFIIMSCVIAVSVNFSTFLVIGKTSPVTYQVLGHLKTCLVLGFGYTLLHDPFTERNIIGILVAVFGMGLYSYFCTQENKKKLVVDPPLSSQVKDKDINSPLLNGKNMDDHEKESHESKKSSKDSIV

SEQ ID NO: 2124 - protein, 349 aa, Glycine max
MGEMSNFQLGVIGALFLSVASSVSIVICNKALMSNLGFPFATTLTSWHLMVTFCTLHAAQRLNLFVSKSVDLKTVMLFGILNGISIGFLNLSLGFNSIGFYQMTKLAIIPFTVLLETIFLKKQFSSKIKFALFLLLVGVGIASITDLQLNFVGTILSLLAIITTCVGQILTNTIQKKLNVSSTQLLYQSAPFQAAILFVSGPVVDQMLTKQNVFAYKYSPVVLAFIILSCLIAVSVNFSTFLVIGKTSPVTYQVLGHLKTCLVLGFGYTLLHDPFTGRNILGILIAVFGMGLYSYFCTEDNKKKQLAGDLPLASQVKDKDSLPLLAGKNVGNQNEENHETNKLSKDSVI

SEQ ID NO: 2125 - protein, 334 aa, Fragaria vesca
MGEMTGFQLGVIGALFLSVASSVSIVICNKALMSNLGFPFATTLTSWHLMVTFCTLHVANRLNFFESKSIDMKTVMLFGILNGVSIGLLNLSLGFNSVGFYQMTKLAIIPFTVLVETIFLKKQFSQQIKFSLFLLLVGVGIASVTDLQLNFVGTVLSLLAIITTCVGQILTNTIQKRLNVSSTQLLYHSAPFQAAILFVSGPVVDQFLTKQSVFSHKYSPIVLVFIILSCLIAVSVNFSTFLVIGKTSPVTYQVLGHLKTCLVLGFGYTLLHDPFTERNIIGILVAIFGMGLYSYFCAQENKKKQAADVKDGAPLLSQDKDSHEVKKLTKNSLV

SEQ ID NO: 2126 - protein, 345 aa, Cirsium arvense
MGELTGYQLGVIGALFLSVASSVSIVICNKALMSNLGFPFATTLTSWHLMVTYCTLHVAHRLNFFENKSIDMKTVILFGILNGISIGFLNLSLGFNSIGFYQMTKLAIIPFTVLLETLFLKKQFSQKIKLSLFLLLVGVGIASVTDLQLNFVGTVLSILAIMTTCVGQILTNTIQKRLNVSSTQLLYQSAPFQAAILFVTGPMVDQYLTKQNVFAYKYSPLVLGFIILSCVIAVSVNFSTFLVIGKTSPVTYQVLGHLKTCLVLGFGYTLLHDPFTERNIIGILVAIVGMGLYSYFCTHENKKKQMLDLSPGSQIKDKDSSAPLLGHQEKENHFEVKKATKDSLV

SEQ ID NO: 2127 - protein, 344 aa, Cucumis sativus
MGEISSFQLGVIGALFLSVASSVSIVICNKALMSNLGFPFATTLTSWHLMVTYCTLHVAHRLNLFESKPIDTKTVVLFGMLNGISIGFLNLSLGFNSVGFYQMTKLAIIPFTVMLETIFLKKQFSSKIRLSLFLLLVGVGIASITDLQLNFLGTVLSLLAIITTCVGQILTNTIQKRLSVSSTQLLYQSAPFQAAILFVSGPFLDQCLTKKNVFAYKYSPVVLAFIILSCLISVSVNFSTFLVIGKTSPVTYQVLGHLKTCLVLGFGYTLLHDPFTERNLIGILIAIGGMGLYSYFCTQETKKKQGDLTLGSQIKDKETAALLAGVLQDKENHEVKKSNKDSLV

SEQ ID NO: 2128 - protein, 345 aa, Carthamus tinctorius
MGELTGYQLGVIGALFLSVASSVSIVICNKALMSNLGFPFATTLTSWHLMVTYCTLHVAHRFNFFENKSIDMKTVILFGILNGISIGFLNLSLGFNSIGFYQMTKLAIIPFTVLLETLFLKKQFSQKIKLSLFLLLVGVGIASVTDLQLNFVGTVLSLLAIMTTCVGQILTNTIQKRLNVSSTQLLYQSAPFQAAILFVTGPVVDQYLTKQNVFAYKYSPLVLGFIILSCVIAVSVNFSTFLVIGKTSPVTYQVLRHLTTCLVLGFGYTLLHDPFTERNIIGILVAIVGMGLYSYFCTHENKKKQVLDLSPGSQIKDKDSSAPLLGHQEKENHFEVKKATKDSLV

SEQ ID NO: 2129 - protein, 344 aa, Citrullus lanatus
MGEISNFQLGVIGALFLSVASSVSIVICNKALMSNLGFPFATTLTSWHLMVTYCTLHVAHRLNLFESKPIDTKTVVLFGMLNGISIGFLNLSLGFNSVGFYQMTKLAIIPFTVMLETIFLKKQFSSKIRLSLFLLLVGVGIASITDLQLNFMGTVLSLLAIITTCVGQILTNTIQKRLSVSSTQLLYQSAPFQAAILFVSGPFLDQCLTKRNVFAYKYSPVVLAFIILSCLISVSVNFSTFLVIGKTSPVTYQVLGHLKTCLVLGFGYTLLHDPFTERNLIGILIAIGGMGLYSYFCTQESKKKQGDLSLGSQIKDKETAALLAGVHQDKENHEVKKSNKASLV

SEQ ID NO: 2130 - protein, 345 aa, Conyza canadensis
MGELTGYQLGVLGALFLSVASSVSIVICNKALMSNLGFPFATTLTSWHLLVTYATLHVAHRFNFFENKSIDMKTVILFGILNGVSIGFLNLSLGFNSIGFYQMTKLAIIPFTVLLETLFLKKQFSQKIKLSLFLLLVGVGIASVTDLQLNFLGTVLSLLAIATTCVGQILTNTIQKRLNVSSTQLLYQSAPYQAAILFVTGPLVDQYLTKQNVFAFKYSPLVLGFIILSCVIAVSVNFSTFLVIGKTSPVTYQVLGHLKTCLVLAFGYTLLHDPFTQRNIIGILVAIVGMGLYSYFCTYENKKKQMVDLSPNSQIKDKDSNTPLLGHQDKENHFEVKKATKDSLV

SEQ ID NO: 2131 - protein, 349 aa, Phaseolus vulgaris
MGEMSNFQLGVIGALFLSVASSVSIVICNKSLMSNLGFPFATTLTSWHLMVTFCTLHAAQRLNLFVSKSIDFKTVMLFGILNGISIGFLNLSLGFNSIGFYQMTKLAIIPFTVLLETIFLKKQFSSKIKFSLFLLLVGVGIASITDLQLNFLGTVLSLLAIITTCVGQILTNTIQKKLNVSSTQLLYQSAPFQAAILFVSGPVVDQMLTKQNVFAYKYSPVVLAFIILSCLIAVSVNFSTFLVIGKTSPVTYQVLGHLKTCLVLGFGYTLLHDPFTGRNILGILVAVFGMGLYSYFCTEDNKKKQLASDLPLASQVKDKDSAAVLAGKNVGNQKEENDEVKKLSKDSVI

SEQ ID NO: 2132 - protein, 343 aa, Echinacea purpurea
MGELTGYQLGVIGALFLSVASSVSIVICNKALMSNLGFPFATTLTSWHLVVTYCTLHVAYRLNFFENKRIDMKTVILFGILNGVSIGFLNLSLGFNSIGFYQMTKLAIIPFTVLLETLFLKKQFSQKIKLSLFVLLLGVGIASVTDLQLNFVGTILSLLAIATTCVGQILTNTIQKRLNVSSTQLLYQSAPFQAAILFVTGPLVDQYLTKQNVFAFKYSPLVLGFILLSCLIAVSVNFSTFLVIGKTSPVTYQVLGHLKTCLVLGFGYTLLHDPFTERNIIGILVAIIGMGLYSYFCTHENKKKQDLSPGSQIKDKDSNTALLGHQDKENHFEVKKPTKDSLV

SEQ ID NO: 2133 - protein, 347 aa, Aquilegia formosa
MGETSGYQLGVIGALALSVASSVAIVICNKALMSNLGFPFATTLTSWHLMVTFCTLHVAQRFNVFETKSIEMKTVVFFGILNGVSIGLLNLSLGFNSIGFYQMTKLAIIPFTVLLETVFLKKQFSQKIKLSLFVLLLGVGIASITDLQLNFVGSVLSLLAIATTCVGQILTNTIQKRLNVTSTQLLYHSAPFQAAILFVSGPVVDQCLTKQNVFAHKYTPVVLAFIILSCLISVSVNFSTFLVIGKTSPVTYQVLGHLKTCLVLGFGYTLLHDPFTERNILGILVAIFGMGLYSYFCTHENKKKQNSDLLISSQIKERETTPLLVHQDKDNHEVKKSNGIINKDSVV

SEQ ID NO: 2134 - protein, 348 aa, Cicer arietinum
MGEMSKIQLGVIGALFLSVASSVSIVICNKALMSNLGFPFATTLTSWHLMVTFCTLHVALRFNLFEAKPVDMKTVMLFGILNGVSIGFLNLSLGFNSIGFYQMTKLAIIPFTVMLETIFLKKQFSQKIKLSLCFLLIGVGIASITDLQLNFVGTILSLLAIITTCVGQILTNTIQKKLNVTSTQLLYQSAPFQAAILFVSGPLVDKMLTKQNVFAYKYSPIVLTFIIMSCVIAVSVNFSTFLVIGKTSPVTYQVLGHLKTCLVLGFGYTLLHDPFTERNIIGILVAVFGMGLYSYFCTQENKKKLLVEPPLASQVKDKDNSPLLSGKNMDNQEKESQESKKASKDSLV

SEQ ID NO: 2135 - protein, 345 aa, Cichorium intybus
MGELTGYQLGVIGALFLSVASSVSIVICNKALMSNLGFPFATTLTSWHLMVTYCTLHVAHRLNFFENKSIDMKTVILFGILNGVSIGFLNLSLGFNSIGFYQMTKLAIIPFTVLLETLFLKKQFSQKIKLSLFLLLVGVGIASVTDLQLNFLGTVLSLLAIMTTCVGQILTNTIQKRLNVSSTQLLYQSAPYQAAILFLTGPMVDQYLTKQSVFAFKYSPLVLGFIILSCVIAVSVNFSTFLVIGKTSPVTYQVLGHLKTCLVLGFGYTLLHDPFTERNIIGILVAIVGMGLYSYFCTHENKKKQIHDLSPGSQIKDKDSNTPLLGHQDKENHFEVKKATKDSLV

SEQ ID NO: 2136 - protein, 343 aa, Chrysanthemum coronarium
MGELTGYQLGTIGALFLSVASSVSIVICNKALMSNLGFHFATTLTSWHLMVTYCTLHVARRLNFFENKSIDMKTVILFGILNGVSIGFLNLSLGFNSIGFYQMTKLAIIPFTVLLETLFLKKQFSQKIKLSLFLLLVGVGIASVTDLQLNFLGTVLSLLAIATTCVGQILTNTIQKRLNVSSTQLLYQSAPYQAAILFVTGPVVDQYLTKQNVFAFNYSPLILGFIILSCVIAVSVNFSTFLVIGKTSPVTYQVLGHLKTCLVLGFGYTLLHDPFTNRNIIGILVAIVGMGLYSYFCTYENKKKQDLSPGSQIKDKDSNTPLLGHQDKENHFEVKKATKDSLV

SEQ ID NO: 2137 - protein, 339 aa, Solanum lycopersicum
MGEMTSFQLGVVGALFLSVASSVSIVICNKALMSNLGFPFATTLTSWHLMVTYCTLHVALKFNFFENKPIDMKTVMLFGILNGVSIGFLNLSLGFNSIGFYQMTKLAIIPFTVLVETLFLKKQFSQNIKFALFILLIGVGIASITDLQLNFVGTILSLLAIVTTCVGQILTNTIQKRLNISSTQLLYQSAPFQAAILFVSGPVVDQFLTKQSVFAYKYSPIVVGFIVLSCLIAVSVNFSTFLVIGKTSPVTYQVLGHLKTCLVLGFGYTLLHDPFTSRNIIGILVAIIGMGLYSYFCVHETKRKQVGDHSSMAQVKEKDTTAPLLAGKNGQVKENNSLV

SEQ ID NO: 2138 - protein, 343 aa, Chrysanthemum coronarium
MGELTGYQLGTIGALFLSVASSVSIVICNKALMSNLGFHFATTLTSWHLMVTYCTLHVARRLNFFENKSIDMKTVILFGILNGVSIGFLNLSLGFNSIGFYQMTKLAIIPFTVLLETLFLKKQFSQKIKLSLFLLLVGVGIASVTDLQLNFLGTVLSLLAIATTCVGQILTNTIQKRLNVSSTQLLYQSAPYQAAILFVTGPVVDQYLTKQNVFAFNYSPLILGFIILSCVIAVSVNFSTFLVIGKTSPVTYQVLGHLKTCLVLGFGYTLLHDPFTNRNIIGILVAIVGMGLYSYFCTYENKKKQDLSPGSQIKDKDSNTPLLGHQDKENHFEVNKVTKDSLV

SEQ ID NO: 2139 - protein, 339 aa, Euonymus alatus
MGEMSSFQIGVIGALFLSVASSVSIVICNKALMSNLGFPFATTLTSWHLVVTFCTLCAAQRFSLFESKTIEMKTVMLFGILNGVSIGLLNLSLGFNSVGFYQMTKLAIIPFTVLVETLFLKKQFSEKIKFSLLILLIGVGIASITDLQLNFVGTVVSFLAIITTCVGQIMTNTIQKRLNVSSTQLLYQSAPFQAAILFVSGPVVDKFLTKQNVFAYKYSPIVLAFIILSCIISVFVNFSTFMVIGKTSPVTYQVLGHLKTCLVLAFGYTLLHDPFTIRNITGILVAMAGMVLYSYFCTQENKKKQSVDLSLGPQVKDKDTLPLLAHQDVESHDPKKSLA

SEQ ID NO: 2140 - protein, 336 aa, Euphorbia peplus
MGEMSRFQVGVIGALFLSVASSVSIVICNKALMSNLGFPFATTLTSWHLLVTYCTLHCAHRFNLFESKPIDMKTVMLFGILNGVSIGLLNLSLGFNSIGFYQMTKLAIIPFTVLLETFFLKKQFSQKIKCALFVLLVGVGIASVTDLQLNMVGTIISLLAIATTCVGQILTNTIQKRLNVSSTQLLYQSAPFQAAILFVSGPMVDQLLTKKNVFAFKYSPIVIGFIVLSCLISVSVNFSTFMVIGKTSPVTYQVLGHLKTCLVLGFGYTLLHDPFTSRNVTGILVAIFGMGLYSYFCTQENKKKQSLDLSLPSLQVKEKDNTPLLAMQDKENIEPK

SEQ ID NO: 2141 - protein, 339 aa, Nicotiana benthamiana
MGEMTRFQLGVVGALFLSVASSVSIVICNKALMSNLGFPFATTLTSWHLMVTYCTLHVALKFNFFENKPIDMKTVMLFGILNGVSIGFLNLSLGFNSIGFYQMTKLAIIPFTVLLETIFLKKQFSRNIKFTLFVLLIGVGYASITDLQLNFVGTILSLLAIVTTCVGQILTNTIQKRLNISSTQLLYQSAPFQAAILFVSGPVVDQFLTKQSVFAYKYSPIVVGFILLSCLIAVSVNFSTFLVIGKTSPVTYQVLGHLKTCLVLAFGYTLLHDPFTSRNIIGILVAIVGMGLYSYFCVNETKRKQVGDLSPMTQVKDKDTTAPLLAGKNGQVKENNSLV

SEQ ID NO: 2142 - protein, 343 aa, Papaver somniferum
MGETPRLQLGVIGALALSVTSSVAIVICNKALMSNLGFPFATTLTSWHLMVTFCTLHVAQRFNVFETKVVDTKTVMLFGILNGVSIGLLNLSLGFNSIGFYQMTKLAIIPFTVLLETLFLKKQFSQNIKFSLSLLLLGVGIASITDLQLNLVGSIISLLAIATTCVGQILTNTIQKRLNVSSTQLLYQSAPFQAGILFVSGPLVDQCLTKQNVFAYKYSPFVLAFIILSCVISVSVNFSTFLVIGKTSPVTYQVLGHLKTCLVLGFGYTLLHDPFTNRNIIGILVAMFGMGLYSYFCTHENKKKQINDLSISQIKETTPFLGNKNMGHQDMEEVKKPNKDSLV

SEQ ID NO: 2143 - protein, 340 aa, Petroselinum crispum
MMMGFQLGVIGALFLSVASSVSIVICNKALMSNLGFPFATTLTSWHLMVTYCTLHVAQRLNFFETKSIDMKTVILFGILNGVSIGFLNLSLGFNSIGFYQMTKLAIIPFTVLLETIFLNKQFSQKIKLSLLLLLLGVGVASVTDLQLNLVGTILSLLAIATTCVGQILTNTIQKRLNVSSTQLLYQSAPFQAAILFVTGPLLDQYLTKQSVFAFSYSPLVLGFIVLSCLIAVSVNFSTFLVIGKTSPVTYQVLGHLKTCLVLGFGYTLLHDPFTARNIIGILIAILGMGLYSYFCTYENKKKQLVDLSSPQVKDRDSNTPLLGHQDRESEVKKLNKDSLV

SEQ ID NO: 2144 - protein, 344 aa, Papaver somniferum
MGETPRLQLGVIGALALSVTSSVAIVICNKALMSNLGFPFATTLTSWHLMVTFCTLHVAQRFNVFETKAVVDTKTVMLFGILNGVSIGLLNLSLGFNSIGFYQMTKLAIIPFTVLLETIFLKKQFSQNIKFSLSLLLLGVGIASITDLQLNLVGSIISLLAIATTCVGQILTNTIQKRLNVSSTQLLYQSAPFQAGILFVSGPLVDQCLTKQNVFAYKYSPFVLAFIILSCVISVSVNFSTFLVIGKTSPVTYQVLGHLKTCLVLGFGYTLLHDPFTNRNIIGILVAMFGMGLYSYFCTHENKKKQINDLSISQIKETTPFLGNKNMGHQDMEEVKKPNKDSLV

SEQ ID NO: 2145 - protein, 334 aa, Daucus carota
MMMGFQLGVIGALFLSVASSVSIVICNKALMSNLGFPFATTLTSWHLMVTYCTLHVAQRLNFFETKSIDMKTVILFGILNGVSIGFLNLSLGFNSIGFYQMTKLAIIPFTVLLETIFLNKQFSQKIKLSLLLLLMGVGVASVTDLQLNLVGSILSLLAIATTCVGQILTNTIQKRLNVSSTQLLYQSAPFQAAILFVTGPLLDQYLTKQNVFAFSYSPLVLGFIILSCLIAVSVNFSTFLVIGKTSPVTYQVLGHLKTCLVLGFGYTLLHDPFTARNIIGILIAIVGMGLYSYFCTYENKKKQLVDLSSPQVKDRDTNTPLLGHQENEVKKSNK

SEQ ID NO: 2146 - protein, 339 aa, Solanum phureja
MGEMTSFQLGVVGALFLSVASSVSIVICNKALMSNLGFPFATTLTSWHLMVTYCTLHVAFKFNFFENKPIEMKTVMLFGILNGVSIGFLNLSLGFNSIGFYQMTKLAIIPFTVLVETLFLKKQFSKNIKFALFILLIGVGIASITDLQLNFVGTILSLLAIVTTCAGQILTNTIQKRLNISSTQLLYQSAPFQAAILFVSGPVVDQFLTKQSVFAYKYSPIVVGFIVLSCLIAVSVNFSTFLVIGKTSPVTYQVLGHLKTCLVLGFGYTLLHDPFTSRNIVGILVAIIGMGLYSYFCVHETKRKQVGDHSSMAQVKEKDTTAPLLAGKNGQVKENNSLV

SEQ ID NO: 2147 - protein, 347 aa, Eucalyptus grandis
MGEMTGFQLGVIGALFLSVASSVSIVICNKALMSNLGFPFATTLTSWHLMVTFCTLHAAQRLNFFESKAIDLKTVMLFGILNGISIGFLNLSLGFNSVGFYQMTKLAIIPFTVLLETLFLKKQFSQKIKFSLFVLILGVGIASITDLQLNFVGTVLSALAIVTTCIGQILTNTIQKKLNVSSTQLLYQSAPFQAAILFVSGPLVDQSLTKQNVFAYKYSPIVLAFIILSCLIAVSVNFSTFLVIGKTSPVTYQVLGHLKTCLVLGFGYTLLHDPFTERNIIGILVAMLGMGLYSYVCTQESKKKQSTDLSNSQVKEKDTEPLLDGKSLGYQDKENQDAKKSSRDSFV

SEQ ID NO: 2148 - protein, 321 aa, Papaver somniferum
MGETPRLQLGVIGALALSVTSSVAIVICNKALMSNLGFPFATTLTSWHLMVTFCTLHVAQRFNVFETKVVDTKTVMLFGILNGVSIGLLNLSLGFNSIGFYQMTKLAIIPFTVLLETIFLKKQFSQNIKFSLSLLLLGVGIASITDLQLNLVGSIISLLAIATTCVGQILTNTIQKRLNVSSTQLLYQSAPFQAGILFVSGPLVDQCLTKQNVFAYKYSPFVLAFIILSCVISVSVNFSTFLVIGKTSPVTYQVLGHLKTCLVLGFGYTLLHDPFTNRNIIGILVAMFGMGLYSYFCTHENKKKQINDLSISQIKETTPFL

SEQ ID NO: 2149 - protein, 305 aa, Echinacea purpurea
MGELTGYQLGVIGALFLSVASSVSIVICNKALMSNLGFPFATTLTSWHLMVTYCTLHVAQRLNFFENKRIDMKTVILFGILNGVSIGFLNLSLGFNSIGFYQMTKLAIIPFTVLLETVFLKKQFSQKIKLSLFLLLLGVGIASVTDLQLNFVGTILSVLAIATTCVGQILTNTIQKRLNVSSTQLLYQSAPFQAAILFVSGPLVDRYLTKQNVFAFKYSPVVLGFIILSCVIAVSVNFSTFLVIGKTSPVTYQVLGHLKTCLVLGFGYTLLHDPFTEKNIIGILIAILGMGLYSYFCTHENKKKQ

SEQ ID NO: 2150 - protein, 324 aa, Papaver somniferum
MGETPRLQLGVIGALALSVTSSVAIVICNKALMSNLGFPFATTLTSWHLMVTFCTLHVAQRFHVFETKVVDTKTVMLFGILNGVSIGLLNLSLGFNSIGFYQMTKLAIIPFTVLLETIFLKKQFSQNIKFSLSLLLLGVGIASITDLQLNLVGSIISLLAIATTCVGQILTNTIQKRLNVSSTQLLYQSAPFQAGILFVSGPLVDQCLTKQNVFAYKYSPFVLAFIILSCVISVSVNFSTFLVIGKTSPVTYQVLGHLKTCLVLGFGYTLLHDPFTNRNIIGILVAMFGMGLYSYFCTHENKKKQITDLSISQIKETTPFLGNK

SEQ ID NO: 2151 - protein, 349 aa, Medicago truncatula
MGEMGKFQLGVIGALFLSVASSVSIVICNKALMSKLGFPFATTLTSWHLMVTFCTLHVAQRLNLFVTKSIDMKTIMLFGFLNGVSIGFLNLSLGFNSVGFYQMTKLAIIPFTVMLETIFLKKQFSQKIKFTLFLLLVGVGVASITDLQLNFVGTIISLLAIITTCVSQILTNTIQKKLNVSSTQLLYHSAPFQAAILFVSGPIVDQLLTNQSVFAYKYSSTVLAFIILSCLIAVSVNFSTFLVIGKTSPVTYQVLGHLKTCLVIGFGYTLLHDPFNGRNIIGILIAIFGMVLYSYFCLEENKKKQLLGDLSLASQVKDKDSSPLLVGKNMDNQEEENHEAKKFSKDSTN

SEQ ID NO: 2152 - protein, 337 aa, Orobanche aegyptiaca
MGEMAGFQLGVIGALFLSVASSVSIVICNKALMSNLGFPFATTLTSWHLMVTYCSLHVALRLNFFENKPIDMKTVILFGILNGISIGFLNLSLGFNSIGFYQMTKLAIIPFTVLLETLFLKKQFSQKIKFSLSVLLLGVGIASVTDLQLNVVGSILSLLAIITTCIGQILTNTIQKRLNVSSTQLLYQSAPFQAAILFVSGPFLDQCLTKQNVFAYKYSPIVLGFILLSCLIAVFVNFSTFLVIGKTSPVTYQVLGHLKTCLVLAFGYTLLHDPFTSRNIVGILIAIIGMGLYSYFCTSDTKRKQGGDVSTLSQIKEKNTTPLLVIQQDKESKTSLV

SEQ ID NO: 2153 - protein, 307 aa, Helianthus annuus
MGELTGFQLGVIGALFLSVASSVSIVICNKALMSNLGFPFATTLTSWHLVVTYCTLHVAHRLNFFENKRIDMKTVILFGILNGVSIGFLNLSLGFNSIGFYQMTKLAIIPFTVLLETLFLKKQFSQKIKLSLFVLLLGVGIASVTDLQLNFVGTILSLLAIATTCVGQILTNTIQKRLNVSSTQLLYQSAPFQAAILFVTGPLVDQYLTKQNVFAFKYSPLVLGFIILSCLIAVSVNFSTFLVIGKTSPVTYQVLGHLKTCLVLGFGYTLLHDPFTERNIIGILVAILGMGLYSYFCTHENKKKQID

SEQ ID NO: 2154 - protein, 347 aa, Panax ginseng
MEKMMGFQLGVIGALFLSVASSVSIVICNKALMSNLGFPFATTLTSWHLMVTYCTLHVAQRLNFFENKSIDMKTVILFGILNGVSIGFLNLSLGFNSIGFYQMTKLAIIPFTVLLETIFLNKQFSQKIRLSLLLLLLGVGVASVTDLQLNLVGSILSLLAIATTCVGQILTNTIQKRLNVSSTQLLYQSAPYQAAILFVTGPLLDQYLTKQNVFAFNYSPMVLGFIVLSCLIAVCVNFSTFLVIGKTSPVTYQVLGHLKTCLVLGFGYTLLHDPFTARNIIGILIAILGMGLYSYFCTYENKLKKHELGDLISSSSAQVRDKDSTPLLGGKNMGHQDKESEVKKSLV

SEQ ID NO: 2155 - protein, 348 aa, Solanum phureja
MGEKTSFQLGVVGALFLSVASSVSIVICNKALMSNLGFPFATTLTSWHLMVTFVTLHVALKFNLFENKPIDMKTVILFGILNGISIGFLNLSLGFNSIGFYQMTKLAIIPFTVLLETIFLKKQFSRNVKFSLLILLLGVGIASITDLQLNFVGTILSLLAIITTCVGQILTNTIQKRLNISSTQLLYQSAPFQAGILFVTGPLVDQFLTNKNVFAHKYSNVVLGFILLSCLIAVSVNFSTFLVIGKTSPVTYQVLGHLKTCLVLGFGYTLLHDPFTLRNIVGILVAIVGMGLYSYFCTHETKKKQPGDHSSISQVKEKDTSTPLLGGKDGYQDKENHESKKLSKDSLV

SEQ ID NO: 2156 - protein, 341 aa, Brassica oleracea
MGEMKSMQMGVIGALFLSVASSVSIVICNKALMTNLGFPFATTLTSWHLMVTYCTLHVAYRLNFFENKPIDTKTVVLFGLLNGISIGLLNLSLGFNSIGFYQMTKLAIIPFTVLLETLFLNKKFSQKIKFSLFLLLVGVGIASITDLQLNFVGSVLSLLAIATTCVGQILTNTIQKKLNVTSTQLLYQSAPFQAAILFVSGPFVDKYLTRLNVFSFQYSPIVVGFITLSCLIAVSVNFSTFLVIGKTSPVTYQVLGHLKTCLVLAFGYTLLHDPFTPRNIAGILIAVLGMLLYSYFCSVASKSKQGSSESAFIGKDKDTTPLLSQEKENHEAKKLDKHSAV

SEQ ID NO: 2157 - protein, 341 aa, Brassica rapa
MGEMKSMQMGVIGALFLSVASSVSIVICNKALMTNLGFPFATTLTSWHLMVTYCTLHVAYRLNFFENKPIDTKTVVLFGLLNGISIGLLNLSLGFNSIGFYQMTKLAIIPFTVLLETFFLNKKFSQKIKFSLFLLLVGVGIASITDLQLNFVGSVLSLLAIATTCVGQILTNTIQKKLNVTSTQLLYQSAPFQAAILFVSGPFVDKYLTHLNVFSFQYSPIVVGFITLSCLIAVSVNFSTFLVIGKTSPVTYQVLGHLKTCLVLAFGYTLLHDPFTPRNIAGILIAVLGMLLYSYFCSVASKSKQGSSESAFIGKDKDTTPLLSQEKENHEAKKLDKHSAV

SEQ ID NO: 2158 - protein, 348 aa, Capsicum annuum
MGEKTSFQLGVVGALFLSVASSVSIVICNKALMSNLGFPFATTLTSWHLMVTFVALHVALRFNFFENKPIDMKTVILFGILNGVSIGFLNLSLGFNSIGFYQMTKLAIIPFTVLLETIFLKKQFSRNIKFSLLILLLGVGIASITDLQLNFVGTILSLLAIVTTCVGQILTNTIQKRLNISSTQLLYQSAPFQAAILFVTGPMVDQFLTKKNVFAHKYSNVVLGFILLSCLIAVSVNFSTFLVIGKTSPVTYQVLGHLKTCLVLGFGYTLLHDPFTSRNIVGILVAIVGMGLYSFFCTHETKRKQLGDHSSIPQVREKDSSTPLLAGKDGYQDKENHESKKLSKISLV

SEQ ID NO: 2159 - protein, 321 aa, Nicotiana benthamiana
MGEMTSFQLGVVGALFLSVASSVSIVICNKALMSNLGFPFATTLTSWHLMVTYCTLHVALKFNFFENKPIDMKTVMLFGILNGVSIGFLNLSLGFNSIGFYQMTKLAIIPFTVLLETIFLKKQFSRNIKLALFVLLVGVGYASITDLQLNFVGTILSLLAIVTTCVGQILTNTIQKRLNISSTQLLYQSAPFQAAILFVSGPVVDQFLTKQSVFAYKYSPIVVGFILLSCLIAVSVNFSTFLVIGKTSPVTYQVLGHLKTCLVLAFGYTLLHDPFTSRNIIGILVAIVGMGLYSYFCVNETKRKQVGDLSSMTQVSHSSSS

SEQ ID NO: 2160 - protein, 262 aa, Setaria italica
MQGDPGYGYGGYGYGYGYGYGAGAGGYDYDVAGYGGGGAYYTANDRYPAAPAAYGNPLSGRRQHDFPAPLTGLEFQPSDTCPKNYVIFDQTYDRSRVMFHPSLANKIGSSGGGYDYDHCCYGYDQNYAGKSAYYGCGDDGGAASIRQKEDTDEIDALMSTEDGEDEDDVLSTGRTPGCRAGGSPDSTCSSEYGASGSGRKHETGGGGGEKKKERMKKMVRTLKGIIPGGDRMDTPAVLDEAVRYLKSLKVEVKKLGARGSSS

SEQ ID NO: 2161 - protein, 265 aa, Sorghum bicolor
MQGDPGYGFGSYGYGYGYGYGTGAGAGGYDYDMAGYGGGGAYYSANDRYPAAPAAYEDPLAGRRQDDFPAPLTGLEFQPSDTCPKNYVIFDQTYDRSRVMFHPSLANNFGSSAGGYDYDRHCYGYEQNYAGKSAYYGCGDDGGGASIRQKEDTDEIDALMSTEDGEDEDDVLSTGRTPGCRAGGSPDSTCSSGYAATGGGGAKHEMGGCGGEKKKERMKKMVRTLKGIIPGGDRMDTPAVLDEAVRYLKSLKVEVKKLGARGSSS

SEQ ID NO: 2162 - protein, 261 aa, Saccharum officinarum
MQGDPGYGYGSYGYGYGYGYGTGAGGYDYDMAGYGGGGAYYSANDRYPAGPAAYEDPLAGRRQHDFPAPLTGLEFRPSDNCPKNYVIFDQTYDRSRVMFHPSLANNFGSSVGGYDYDRHCYGYEQNYAGQSAYYGCDDGGASIRQKEDTDEIDALMSTEDGEDEDDVLSTGRTPGCRAGGSPDSTCSSGYAAAGGGCGKHKMAGGGGEKKKERMKKMVRTLKGIIPGGDRMDTPAVLDEAVRYLKSLKVEVKKLGARGSSS

SEQ ID NO: 2163 - protein, 253 aa, Panicum virgatum
MQGDPGYGYGYGYGAGAGGYDYDMAGYGGEGGAYYTANDRYPVAPAANEDPVAGTRQHDFPAPLTGLEFQPSDTCPKNYVIFDQTYDRSRMMFHPSLVPNNLGSSVGGYDYDYDHRCYGYDQNYAGKSAYYGCGDDGGAASIRQEDTDEINALMSTEDGEDEDDVRSTGRTPGCRAGGSPDSTCSSAGCSAGRKHEAGGEKKKERMKKMVRTLKGIVPGGDRMDTPAVLDEAVRYLKSLKVEVKKLGARGSSG

SEQ ID NO: 2164 - protein, 243 aa, Setaria italica
MQGDPGYGYGGYGYGYTAGAGGYNYDMASYGGGGAYHTANDQYPAAPATYEDPLAGRRQHDFPAPLTGLEFQATDTCPKNYVIFDQTYDRSRVMFHPSLANNLGSSGGGYGHDHGCYGYDQNYAGKGAYYGDGGGTASVRQKEDTDEIDALMSTEDGEDEDDVRSTGRTPGCGGAGGSPDSTCSSGGGGQKKKERMKKMVRTLKGIVPGGDRMDTPAVLDEAVRYLKSLKVEAKKLGARGSSS

SEQ ID NO: 2165 - protein, 237 aa, Panicum virgatum
MQGDPGYGHGGYGHGGYGHGAGGYGSDMAGYGAYYAASDLYPAAPAAYEDPLAGRQQHDFPAPLTGLEFQPSDTCPRNYVIFDQTYDRSRVMFHPSLASNFGGYGYDQACAGNSGGGGGGASVRQKEDTDEIDALMSTEDGEDEDDVVSTGRTPGCRGGGSSPDSTCSSGCGGGRKQEAGGGEKKKKERMKKMVRTLKGIIPGSERMDTPAVLDEAVRYLKSLKVEVKKLGACGSSS

SEQ ID NO: 2166 - protein, 264 aa, Zea mays
MQGDPGYGYGGYGAGAGGYGYDYDVAANCAGGGYYSAANDRYPAAPPPAAAYEDPLGGRRQHDFPAPLTGLEFQPSDTCPKNYVIFDQTYDRSRVMFHPSLANNFGSSAGGYDYGNHCYGYDQTYPGESAYHGCGDDAGAGAGGVSVRQKEDTDEIDALMSTEEGDEEDDVLSTGRTPGCRAGGSPDSTCSSGGYAGNSSGGRKHETGGGEKKKERMKKMVRTLKGIIPGGDRMDTPAVLDEAVRYLKSLKVEVKKAGARGSSS

SEQ ID NO: 2167 - protein, 435 aa, Panicum virgatum
MDRPPRCIVVSPIIASFVPFLLLLLVSSSVVIPASAGGGGGNGTAAPFRSGEELLRLQRIKARLARTRDASVKTIQSPDGDVIDCVPTQLQPAFEHPKLRGHRPEREPAERPGSSSGRVDADDRDDEDALPQVWRRSGESCPEGTIPVRRTTEAEVLRASSVGRFGMKARGGGGGFARRDSTGSGHEHAVGYVSGGQFYGAKASLNVWPAQVASPAEFSLSQIWVISGAFGNDLNTIEAGWQVSPQLYGDNNPRFFTYWTDDAYRETGCYNLHCSGFVQTSSRVAIGAAISPISSSGGRQFDITVLIWKDPRRGHWWLQLGAGALVGYWPSSLFTHLGSRADMVQFGGEVVNARPAGAPHTPTQMGSGRFPGEGYARAAYFRNVQVVDWDNSLVPAAGLRLLADRPGCYDIAGGSGGAWGTYFYYGGPGRNARCP

SEQ ID NO: 2168 - protein, 434 aa, Sorghum bicolor
MAASCSCFVPFLLLLLASASALTTTERRGNNGTRRPAFSSEEELRGFRSITARLARLRDASVKTIQSPDGDVIDCVPAHLQPAFEHPKLRGQKPESEPAERPRSSSGSFSDAADRGEDDDDDDPLPQAWRRSGESCPDGTVPVRRTTEDDVLRASSSSATRFGMKARGGVFARRDSTGGGHEHAVGYVTGGQFYGAKASLNVWPAQVASPAEFSLSQIWVISGAFGHDLNTIEAGWQVSPQLYGDNSPRFFTYWTDDAYKETGCYNLHCSGFVQTSSRVAIGAAISPISTYAGRQFDITVLIWKDPRRGHWWLQLGSGGSAGGLVGYWPSALFTHLGSRADMVQFGGEVVNARPAGAPHTPTQMGSGRFPAEGYARAAYFRNVQVVDWDNSLVPAAGLRLLADRPGCYDIAGGSGGAWGTYFYYGGPGRNARCP

SEQ ID NO: 2169 - protein, 135 aa, Saccharum officinarum
MEAQDDCKWRQIPAFGDWNLWDDMPVTQYFQAGTFFFAAPAEKDDEDLFKVPQFPAKPYSYKKCVVRVKGEKETAVPPARKGGRRRYVNEQQKWKPKGAVDEDLYKISPQLLCKVKKKKLLRNLLGGCLGLSCIA

SEQ ID NO: 2170 - protein, 136 aa, Sorghum bicolor
MEAQDDCKWRQIPAFGDWNLWDDMPVTQYFQAGTFFFAAPAEKDDEDLFKVPQFPAKPYSYKKCVVRVKGEKETAVPPARKGGRRRYVNEQQKWKPKGAVVDEDLYKISPQLLCKVKKKKLLRNLLGGCLGLSCIA

SEQ ID NO: 2171 - protein, 135 aa, Setaria italica
MEAQDDCKWRQIPAFGDWNLWDDMPVTQYFQAGPFFFTAPVDKDDEDLFKVPQFPAKPYSYKKCVVRVKGEKANAVPARKKGGRRQYVNEQQKWKPKGAVDEDLYKISPQLLCKVKKKKLLRNLLGGCLGLSCIA

SEQ ID NO: 2172 - protein, 135 aa, Echinochloa colona
MEAQDDCKWRQIPAFGDWNLWDDMPVTQYFQAGPFFFTAPVDKDDEDLFKVPQFPATPYSYKKCVVRVKGEKAKAVPARKKGGRRQYVNEQQKWKPKGAVDEDLYKISPQLLCKVKKKKLLRNLLGGCLGLSCIA

SEQ ID NO: 2173 - protein, 135 aa, Panicum virgatum
MEVQDDYKWRQIPAFGDWNLWDDMPVTQYFQAGPFFFTAPVDKDDEDLFKVPQFPAKPYSYKKCVVRVKGEKTNAVPARKKGGRRQYVNEQQKWKPKGAVDEDLYKISPQLLCKVKKKKLLRNLLGGCLGLSCIA

SEQ ID NO: 2174 - protein, 136 aa, Cenchrus ciliaris
MEAQDDCKWRQIPAFGDWNLWDDMPVTQYFQAGPFFFTAPVDKDDEDLFKVPQFPAKPYSYKKCVVRVKGEKANAVPARKKGGRRPQYVNEQQKWKPKGAVDEDLYKISPQLICKVKKKKLLRNLLGGCLGLSCIA

SEQ ID NO: 2175 - protein, 135 aa, Panicum virgatum
MEAQDDGKWRQIPAFGDWNLWDDMPVTQYFQAGPFFFTAPVDKDDEDLFKVPQFPAKPYSYKKCVVRVKGEKTNAVPARKKGARRQYMNEQQKWKPKGAVDDDLYKISPQLLCKVKKKKLLRNLLGGCLGLSCIA

SEQ ID NO: 2176 - protein, 136 aa, Pennisetum glaucum
MEAQDDCKWRQIPAFGDWNLWDDMPVTQYFQAGPFFFTAPVDKDDEDLFKVPQFPAKPYSYKKCVVRVKGEKANAVPARKKGGRRPQYLNEQQKWKPKGAVDEDLYKISPQLICKVKKKKLLRNLLGGCLGLSCIA

SEQ ID NO: 2177 - protein, 344 aa, Sorghum bicolor
MAPPDEGAGAAAGGARRRWVRRETLLGLALGQFVSLLITATGFASSELARRGINAPTSQSLLNYILLAVAYGGVLLYRRQPLTIKWYYYLILGIIDVEANYIVVKSYQYTSLTSVMLLDCWSIPCVIVLTWVFLKTKYGLRKFLGVGVCVVGLILVVFSDVHASDRAKGPNPLKGDLFVILGSMLYACSNVTEEFVIKKSNRVELMAMLGLFGAIVSGIQISILERKELHSITWTSGAVLPFVGFAVAMFLFYSTVPIILKICGATMLNLSLLTSDMWAVLIRIFAYHEKVDWIYFVAFAATAGGIVLYSYKGSNEVEETAQVAGASDEHGKDRDEEAGTRNPV

SEQ ID NO: 2178 - protein, 345 aa, Panicum virgatum
MAPPPEDESGGAGVGRCCVGGARWVLLGLALGQFVSLLITSTGFASSELARRGINAPTSQSLLNYILLSLVYGVVLLYRRQPLTIKWYYYLILGIIDVEANYIVVKSYQYTSLTSVMLLDCWSIPCVIVLTWVFLKTKYGLRKFLGVGVCVAGLILVVFSDVHASDRAKGPNPLKGDLLVIFGSMLYACSNVTEEFVVKKSNRVELMAMLGLFGAIVSAIQISILERKELHSITWNAGAVLLFLGFVVAMFLFYSTVPTVLKICGATMLNLSLLTSDMWAVLIRIFAYHEKVDWIYFVAFACTAAGIIIYSYKSSREVEETAQVTGASDEKGKEGDEEAGAHYPV

SEQ ID NO: 2179 - protein, 344 aa, Oryza sativa
MAPPLLPAAEEDGGCVARWMRRDVLLGLALGQFVSLLITSTGFSSSELARRGINAPTSQSLLNYILLSLIYGGILIYRRQPLTIKWYYYLILGIIDVEANYIVVKSYQYTSLTSVMLLDCWSIPCVIILTWIFLKTKYGLRKFIGVGVCVAGLILVVFSDVHASDRAKGPNPLKGDLLVIFGSMLYACSNVTEEYLVKKSNRIELMAMLGLFGAIISGIQISILERKELHSIKWNAGAVLPFLGFALAMFLFYSTVPTVLKICGATMLNLSLLTSDMWAVLIRIFAYHEKVDWIYFVAFAGTAAGLLIYSYKSSKEAEETAQVAGASDKQGKAGDEEAGMQNSS

SEQ ID NO: 2180 - protein, 194 aa, Sorghum bicolor
MAKARRPPFSAAERFLGFPRGGPSPGAVAPAPAADFDDLPDLAEADVWYTAAGGGGDPGSPCPAASRQVEVEGRSAGGQRGAPRRGVQGGLSQAFGDGPGGRQVAASAPVEVPAWPARFAVPDAEPALLFEMEMGDDDDEGDGKRGAGGWVPPHVYLARRQARASVVEGAGRTLKGRDMSRVRDAVWSRTGFDG

SEQ ID NO: 2181 - protein, 540 aa, Hordeum vulgare
MPPRPSLPLAFLLLLAARLAGADDPYRYFTWIVTYGPINPLGTTQQGILINGQFPGPRIDCVTNDNLIVNVVNNLDEPFLITWNGIKQRKNSWQDGVAGTNCPIPPGANYTYKFQAKDQIGTFTYFPSVALHRAAGGFGALNVYQRPSIPVPYPLPAGDFTLLVGDWYLAGHDQLRQTLDSGAPLPFPDALLINGMPSATLVGDQGRTYLLRVSNVGMKTSINFRIQGHSLRLAEVEGTHPVQNVYDSLDVHVGQSVAFLVTLDQPPMDYAVVASTRFNPADTTPLTAVGTLHYSSATSMAPGPLPAGPPEEIEWSMNQARSFRWNLTASAARPNPQGSFHYGTIQTSRTLVLASSAPVVAGQRRYAVNGVSFVVPDTPLKLLDNYNIANMIEWDSVPERPDGGAPRPGTPVVRLNLHEFVEVVFQNTENEMQSWHLDGYDFWVVGYGNGGQWTENERLNYNLVDAQARHTVQVYPNGWSAILVSLDNQGMWNLRSANWDRQYLGQQLYLRVWTAEQSFSNEYSIPTNAILCGRAAGLPH

SEQ ID NO: 2182 - protein, 540 aa, Secale cereale
MPSLALAPWVLLLFLAASHAGADDPYRYFTWTVTYGPINPLGTTQQGILINGQFPGPRIDCVTNDNLIVNVVNNLDEPFLITWNGIKQRKNSWQDGVAGTNCPIPPGANYTYKFQAKDQIGTFTYFPSVALHRAAGGFGALNVYQRPAIPVPYPLPAGDFTLLVGDWYLAGHDQLRQTLDSGAPLPFPDALLINGMPSATLVADQGRTYLLRVSNVGMKTSINFRIQGHSLKLAEVEGTHPVQNVYDSLDVHVGQSVAFLVTLDQPPMDYAVVASTRFNPDHTSPLTAVGTLHYSSATSMAPGPLPTGPPEETEWSMNQARSFRWNLTASAARPNPQGSFHYGTIQTSRTLVLASSAAVVAGQRRYAVNGVSFVVPDTPLKLLDNYNIANAIEWDSVPERPDGGAPRPGTPVVRLNLHEFVEVVFQNTENEMQSWHLDGYDFWVVGYGNNGQWTENERLNYNLVDAQARHTVQVYPNGWSAILVSLDNQGMWNLRSANWDRQYLGQQLYLRVWTAEQSFSNEYSIPTNAILCGRAAGLPH

SEQ ID NO: 2183 - protein, 537 aa, Setaria italica
MAPALALLVLLAVAVSLAGADDPYRYYTWTVTYGPINPLGTTQQGILINGQFPGPRIDCVTNDNLIVNVVNNLDEPFLLTWNGIKQRKNSWQDGVAGTNCAIPPGANYTYKFQAKDQIGTFFYFPSLALHRAAGGFGALNVYQRPAIPVPYPPPAGDFTLLVGDWYAAGHKQLRQALDAGAAALPPPDGLLINGAQSATFVGDLGRTYLFRVSNVGLKASVNVRIQGHSLRLAEVEGTHPVQNAYDSLDIHPGQSLAFLVTLDKPPLDYAVVVSTRFAAANLTAVGTLHYAGATARAPGPLPPPPPGQFDWSLNQARSFRWNLTASAARPNPQGSFHYGTIPTSRTLVLASSSSAVLAGRRRCAVNGVSFVVPDTPLKLADNYNIANVMDWDGVPARPVGGAPPRAGTPVVRLNLHEFVEVVFQNTENEMQSWHLDGYDFWVVGYGNGQWTEMQRQTYNLVDAQARHTVQVYPNGWSAILVSLDNQGMWNLRSAIWDRQYLGQQLYLRVWTPEQSFANEYSIPTNAILCGRAAGLPH

SEQ ID NO: 2184 - protein, 537 aa, Panicum virgatum
MPAMAALLVLLLAVAAPLAGADDPYRYFTWTVTYGPISPLGTTQQGILINGQFPGPRIDCVTNDNLLVTVVNNLDEPFLLTWNGIKQRKNSWQDGVAGTNCPIPPAANYTYKFQAKDQIGTFTYFPSLALHRAAGGFGALNVYQRPRIPVPYPPPAGDFTLLVGDWYRAGHRQLRQSLDAGAPLPPPDGLLINGARSPPAFVGARGGTYLFRVSNVGLRASVNVRIQGHRLRLVEVEGTHPVQNAYDSLDVHAGQSLAFLVALDQPPLDYAVVVSTRFAPANLTAVATLHYAGATARAPGPLPPGPPGQYDWSVNQARSFRWNLTASAARPNPQGSFHYGAIPTSRTLVLASSSPALAGRRRCAVNGVSFVVPDTPLKLADNYNIANVIEWDSLPARPAGGAPPRAGTPVVRLNLHEFVEVVFQNTENELQSWHLDGYDFWVVGYGDGQWTEMQRRTYNLVDAQARHTVQVYPNGWSAILVSLDNKGMWNLRSAIWDRQYLGQQLYLRVWTPQQSFSNEYSIPTNAILCGRAAGLPH

SEQ ID NO: 2185 - protein, 543 aa, Panicum virgatum
MPAAMAAAVLLVLLLAVAAPPLAGADDPYRYFTWTVTYGPISPLGTTQQGILINGQFPGPPIDCVTNDNLIVTVVNRLDEPFLLTWNGIKQRKNSWQDGVAGTNCPIPPGANYTYKLQAKDQIGSFTYFPSLALHRAAGGFGALNVYQRPKIPVPYPPPAGDFTLLVGDWYAAGHRQLRRTLDAGAPLPPPDGLLINGARSPPAFVGARGGTYLFRVSNVGLKASVNVRIQGHRLRLAEVEGTHPVQNVYDSLDVHAGQSLAFLVALDQPPLDYAVVVSTRFAAADLTAVATLHYAGAAARAPGPLPAAPPPGQYGWSVNQARSFRWNLTASAARPNPQGSFHYGAIPTSRTLVLASSSPAIAGRRRCAVNGVSFVVPDTPLKLADNYNIANVIEWDSLPARPGAAGAPPRAGTPVVRLNLHEFVEIVFQNTENELQSWHLDGYDFWVVGYGDGQWTEMQRQTYNLVDAQARHTVQVYPNGWSAILVSLDNQGMWNLRSAIWDRQYLGQQLYLRVWTPQQSFSNEYSIPTNAILCGRAAGLPH

SEQ ID NO: 2186 - protein, 256 aa, Sorghum bicolor
MDEWVHQAEVWVRQAESWIRQQPTEQIYIAAAVVALTILLLIVASCLKSSKPNTIVLSGLSGSGKTTIFYQLRDGSSHQGTVTSMEENNDTFVLHSEQERKGKVKPVHVVDVPGHSRLKPKLDEVLPKAAGVVFIVDAQDFLSSMQAAAEYLYDILTKAIVVKKKVPVLIFCNKTDKVTAHSKEFIKKQLEKEINKLRESRNAISSADISDEVQLGVPGEVFNFSQCQNKVAVAEGAGSTGNVSAVEQFIREHVKA

SEQ ID NO: 2187 - protein, 256 aa, Saccharum officinarum
MDEWIRQAELWVRQAESWIRQQTPEQIYIAAAVVALTILLLIVASCLKSSKPNTIVLSGLSGSGKTTIFYQLRDGSSHQGTVTSMEENDDTFVLHSEQERKGKVKPVHVVDVPGHARLKPKLDEVLPKAAGVVFVVDAQDFLSSMQAAAEYLYDILTKATVVKKKVPVLIFCNKTDKVTAHSKEFIKKQLEKEINKLRESRNAISSADISDEVQLGVPGEVFNFSQCQNKVAVAEGAGSTGNVSAVEQFIREHVKA

SEQ ID NO: 2188 - protein, 256 aa, Sorghum bicolor
MDEWIRQAEVWVRQAESWIRQQPPEQIYVAAAVVAVTILVLIVASCLKSSKLNTIVLSGLSGSGKTTLFYQLRDGSSHQGTVTSMEENSDTFVLHSEQEKKGKVKPVHIVDVPGHARLKPKLDEVLPKAAGVVFVVDAQDFLSSMQAAAEYLYDILTKATVVKKKVPVLIFCNKTDKVTAHSKEFIKKQLEKELNKLRESRTAISSADISDEVQLGVPGEAFNFSQCQNKVAVAEGAGSAGNVLAVEQFIREHVKA

SEQ ID NO: 2189 - protein, 256 aa, Saccharum officinarum
MDEWIRQAEVWVRQAESWIRQKPPEQIYVAAAVVAVTILVLILASCLKSSKPNTIVLSGLSGSGKTTLFYQLRDGSSHQGTVTSMEENSDTFVLHSEQERKEKVKPVHIVDVPGHARLKPKLDEVLPKAAGVVFVVDAQDFLSSMQAAAEYLYDILTKATVVKKKVPVLIFCNKTDKVTAHSKEFIKKQLEKELNKLRESRTAISSADISDEVQLGVPGEAFNFSQCQNKVAVAEGAGSAGNVSAVEQFIREHVKA

SEQ ID NO: 2190 - protein, 256 aa, Zea mays
MDEWIRQAEVWVRQSESWIRQQPPEQIYVAATVVAVTILLLIVASYLKSSKPSTIVLSGLSGSGKTTIFYQLRDGSSHQGTVTSMEENSDTFVLHSEQERKGKVKPVHIVDVPGHARLKPKLDEVLPKAAGVVFIVDAQDFLSSMQAAAEYLYDILTKASVVKKRIPVLIFCNKTDKVTAHSKEFIKKQLEKELNKLRESRNAISSADISDEVQLGVPGEAFNFSQCQNKVAVAEGAGSTGNVLAVEQFIREHVRA

SEQ ID NO: 2191 - protein, 256 aa, Setaria italica
MDEWIRQAESWAGQAESWIRQQPPEQIYVAAAVVAITILVLIAASCLKSSKPNTIVLSGLNGGGKTTLFYQLRDGSSHQGTVTSMEENNDTFVLHSEQERKGKVKPVHIVDVPGHARLKPKLDEVLPKAAGVVFVVDAQDFLSSMQAAAEYLYDILTKAIVVKKKVPLLIFCNKTDKVTAHSKEFIKKQLEKEINKLRESRNAISSADITDEVQLGVPGEAFNFSQCQNKVTVAEGAGSTGNVSAVEQFIRECVKA

SEQ ID NO: 2192 - protein, 256 aa, Zea mays
MDEWIRQTEVWVHQTDSWIRQQPPEQIYVAAAVVAVTILLLIVASCLKSSRPNTIVLSGLSGSGKTTIYYQLRDGSSHQGTVTSMEENSDTFVLHSEQERKDKVKPVHIIDVPGHARLKPKLDEVLPKAAAVVFVVDAQDFLSSMQAAAEYLYDILTKATVVKKKVPVLIFCNKTDKVTAHSKEFIKKQLEKELNKLRESRNAVSSADISDEVQLGVPGEAFNFSQCQNKVAVAEGAGLTGDVSAVEQFIREHVKA

SEQ ID NO: 2193 - protein, 256 aa, Setaria italica
MDEWIRQAEAWVGQAESWIRQQPPEQIYVAAVVVAVTILVLIAASCLKSSKPNTIVLSGLSGSGKTTLFYQLRDGSSHQGTMTSMEENNDEFVLNSEKERKGKVRPVHIVDVPGHARLKPKLDEVLPKAAGIVFVVDAQDFLSSMQAAAEYLYDTLTKASVVKKKVPVLIFCNKTDKVTAHSKEFIKKQLEKEINKLRESRNAISSADISDEVKLGVPGEAFNFSQCQNKVTVAEGAGLTGNVSAVEQFIREYVKA

SEQ ID NO: 2194 - protein, 256 aa, Pennisetum glaucum
MDEWIRQAELWVRHAETWIRQQPPEQIYVAIAVVAFTILVLIAASCLKSSKSNTVVLSGLTGSGKTTLFYQLRDGSSHQGTVTSMEENNDTFVLHSEQERKGKVKPVHIVDVPGHARLKPKLDEVLPKAAGLVFVVDAQDFLSSMQAAAEYLYDILTKATVVKKKIPVLIFCNKTDKVTAHSKEFIKKQLEKEINKLRESRNAISSADISDEVQLGVPGEAFNFSQCQNKVTVAEGAGLTGIVSDVEQFIRENVKA

SEQ ID NO: 2195 - protein, 256 aa, Panicum virgatum
MDEWIRQAELWGRQAEAWIRQQPPEQIYVAAAVVALTVLVLIAASCLKSSKPNTIVLSGLSSSGKTTLFYQLRDGSSHQGTVTSMEENNDTFVLHSEKERKGKVKPVHIIDVPGHPRLKPKLDEVLPKAAGVVLVVDAQDFLSSMQAAAEYLYDILTKASVVKKRVPVLIFCNKTDKVTAHSKEFIKKQLEKEINKLRESRKAISSADISDEVQLGVPGEAFNFNQCQNKVTVAEGAGLTGNVSAVEQFIRDYVEA

SEQ ID NO: 2196 - protein, 257 aa, Pennisetum glaucum
MDEWIRQAEAWVGQAESWIRQQPPEQIYVAAMVLAVTILVFIAASCLKSSKPNTIVLSGLSGSGKTTLFYQLRDGSSHRGTVTSMEENNDAFVLNSEKERKGKVRPVHIVDVPGHARLKPKLNEVLPKAAGVVFVVDAQDFLSSMQAAAEYLYDTLTKASVVKKKVPVLIFCNKTDKVTAHSKEFIKKQLEKEINKLRESRNAISSADISDEVKLGVPGEVFNFSQCQNKVTVAEGAGLTGHVSAVEQFIRENVKAL

SEQ ID NO: 2197 - protein, 256 aa, Secale cereale
MDEWVRQAEAWAGQAERWIRQQPPEQIYVAVAVIAVTILVLLAASCLKSSKSNTIVLSGLSGSGKTILFYQLRDGSSHQGTVTSMDPNNDTFVLHSELERKGKVKPVHVVDVPGHARLKPKLDEFLPRAAGVVFVVDAQDFLSSMQAAAEYLYDILTKATVVKKRVPVLIFCNKTDKVTAHSKEFIKKQLEKELNKLRESRNAISSADITDEVELGVPGEAFNFSQCQNKVTVAEGAGLTGNVSAVEQFIREHVRA

SEQ ID NO: 2198 - protein, 256 aa, Triticum aestivum
MDEWVRQAEAWAGQAERWIRQQPPEQIYVAVAVIAVTILVLLAASCLKSSKSNTIVLSGLSGSGKTILFYQLRDGSSHQGTVTSMDPNNDTFVLHSELERKGKVKPVHVVDVPGHARLKPKLDEFLPRAAGVVFVVDAQDFLSSMQAAAEYLYDILTKATVVKKRVPVLIFCNKTDKVTAHSKEFIKKQLEKEVNKLRESRNAISSADITDEVELGVPGEAFNFSQCQNKVTVAEGAGLTGNVSAVEQFIREHVRA

SEQ ID NO: 2199 - protein, 256 aa, Brachypodium distachyon
MDEFVRQAEAWAGEAERWIRQQPPEQIYVAAAVVAVTILVLLAASCLKSSKSNTIVLSGLSGSGKTILFYQLRDGSSHQGTVTSMEHNNDTFVLHSELERKGKIKPVHVVDVPGHARLKPKLDEFLPQAAGVVFVVDAQDFLSSMQAAAEYLYDILTKATVVKKRIPVLIFCNKTDKVTAHSKEFIKKQLEKEVNKLRESRNAISSADITDEVQLGVPGEAFNFSKCQNKVTVAEGAGLTGSVSEVEQFIREYVKA

SEQ ID NO: 2200 - protein, 256 aa, Lolium multiflorum
MDEWLNQAEAWAGQAERWIRQQPPEQIYVAVAVIALTVLVLLAASCLKSSKSNTIVLSGLSGSGKTILFYQLRDGSSHQGTVTSMEHNNDTFVLHSELERNGKVKPVHVVDVPGHARLKPKLDEFLPQAAGVVFVVDAQDFLSSMQAAAEYLYDILTKATVVKKRIPVLIFCNKTDKVTAHSKEFIKKQLEKEVNKLRESRNAISSADITDEVQLGVPGEAFNFSQCQNNVTVAEGAGLTGNVSAVEQFIREHVKA

SEQ ID NO: 2201 - protein, 256 aa, Avena sativa
MDEWINQAEAWAGQAERWIRQQPPEQIYVAVAVIALTILVLVAASCFKSSKSNTIVLSGLSGSGKTILFYQLRDGSAHQGTVTSMEHNNDTFVLHSELERKGKVKPVHIVDVPGHARLKPKLDEFLPQAAGVVFVVDAQDFLSSMQAAAEYLYDILTKATVVKKRVPVLIFCNKTDKVTAHSKEFIKKQLEKEVNKLRESRNAISSADITDEVQLGVPGEAFNFSQCQNNVTVAEGAGLTGNVSAVEQFIREHVKA

SEQ ID NO: 2202 - protein, 256 aa, Brachypodium distachyon
MDEWVRQAEAWAGEAERWIRQQPPEQIYVAAAVVAVTVLVLLAASCLKSSKSNTIVLSGLSGSGKTILFYQLRDGSSHQGTVTSMEHNNDTFVLHSELERKGKIKPVHVVDVPGHARLKPKLDEFLPQTAGVVFVVDAQDFLSSMQAAAEYLYDILTKATVVKKRIPVLIFCNKTDKVTAHSKEFIKKQLEKEVNKLRESRNAISSADITDEVQLGVPGEAFNFSQCLNKVTVAEGAGLTGNVSEVEQFIREYVKA

SEQ ID NO: 2203 - protein, 256 aa, Festuca arundinacea
MDEWLNQAEAWAGQAERWIRQQPPEQIYVAVAVIALTILVLVAASCLKSSKSNTIVLSGLSGSGKTILFYQLRDGSSHQGTVTSMEHNNDTFVLHSELERNGKVKPVHVVDVPGHARLKPKLDEFLPQAAGVVFVVDAQDFLSSMQAAAEYLYDILTKATVVKKRVPVLIFCNKTDKVTAHSKEFIKKQLEKEVNKLRESRNAISPADITDEVQLGIPGEAFNFSQCQNNVTVAEGAGLTGNVSAVEKFIREHVKA

SEQ ID NO: 2204 - protein, 256 aa, Leymus cinereus x Leymus triticoides
MDEWVRQAEAWAGQAESWIRQQPPEQIYVAVAVIAVTILVLLAASCLKSSKSNTIVLSGLSGSGKTILFYQLRDGSCHQGTVTSMDPNNDTFVLHSELERKGKVKPIHVVDVPGHARLKPKLDEFLPRAAGVVFVVDAQDFLSSMQAAAEYLYDILTKAAVVKKRVPVLIFCNKTDKVTAHSKEFIKKQLEKEVNKLRESRNAISSADITDEVELGVPGEAFNFSQCQNKVTVAEGAGLTGNVSAIEQFIREHVRA

SEQ ID NO: 2205 - protein, 256 aa, Hordeum vulgare
MDEWVRQAEAWAGQAERWIRQQPPEQIYVAVAVIAVTILVLLAASCLKSSKSNTIVLSGLSGSGKTILFYQLRDGSSHQGTVTSMDPNNDTFVLYSEMERKGKVKPVNVVDVPGHARLKPKLDEFLPRAAGVVFVVDAQDFLSSMQAAAEYLYDILAKATVVKKRVPVLIFCNKTDKVTAHSKEFIKKQLEKEVNKLRESRNAISSADITDEIELGVPGEAFNFSQCQNKVTVAEGAGLTGNVSAVEQFIREHVRA

SEQ ID NO: 2206 - protein, 256 aa, Avena sativa
MDEWINQAEAWAGQAERWIRQQPPEQIYVAVAVIVLTLLVLFAASCFKSSKSNTIVLSGLSGSGKTILFYQLRDGSAHQGTVTSMEHNNDTFVLHSELERKGKVKPVHIVDVPGHARLKPKLDEFLPQAAGVVFVVDAQDFLSSMQAAAEYLYDILTKATVVKKRVPVLIFCNKTDKVTAHSKEFIKKQLEKEVNKLRESRNAISSADITDEVQLGVPGEAFNFSQCQNNVTVAEGAGLTGNVSAVEQFIREHVRA

SEQ ID NO: 2207 - protein, 252 aa, Avena sativa
INQAEAWAGQAERWIRQQPPEQIYVAVAVIALTILVLFAASCFKSSKSNTIVLSGLSGSGKTILFYQLRDGSAHQGTVTSMEHNNDTFVLHSELERKGKVKPVHVVDVPGHARLKPKLDEFLPQAAGVVFVVDAQDFLSSMQAAAEYLYDILTKATVVKKRVPVLIFCNKTDKVTAHSKEFIKKQLEKEVNKLRESRNAISSADITDEVQLGVPGEAFNFSQCQNNVTVAEGAGLTGNVSAVEQFIREHVRA

SEQ ID NO: 2208 - protein, 256 aa, Oryza sativa
MDEWVRQAEVWVGQAERWIRQQPPEQVYVAVAVVAVTVLLLVAVSCLKSSKANTIVLSGLSGSGKTILFYQLRDGSTHQGTVTSMEQNNDTFVLHSELERRGKVKPVHVVDVPGHARLKPKLDEVLPQAAGIVYVVDAQDFLSTMHAAAEYLYDILTKATVVKKRVPVLIFCNKTDKVTAHSKEFIKKQLEKELNKLRESRNAISSADITDEVKLGNPGEAFNFSQCQNKVTVTEGAGLTGNVSAVEEFIREYVKA

SEQ ID NO: 2209 - protein, 256 aa, Triticum aestivum
MDEWVRQAEAWAGQAEHWIRQQPPEQIYVAVAVIAVTILVLVAASCLKSSKPNTIVLSGLSGSGKTVLFYQLRDGSSHQGTVTSMTHNNATFVLHSELERKGKVKPVHVIDVPGHARLKSKLDEVLPQAAGIVFVVDALDFLSSMQAAAEYLYDILTKATVVKKRIPVLIFCNKTDKVTAHSKEFIKKQLEKEVNKLRESRNAISSADISDEVQLGLPGEAFNFSQCQNKVIVDEGAGLTGDVSAVEQFIREYVKP

SEQ ID NO: 2210 - protein, 256 aa, Aegilops tauschii
MDEWVRQAEAWAGQAEHWIRQQPPEQIYVAVAVIAVTILVLVAASCLKSSKPNTIVLSGLSGSGKTVLFYQLRDGSSHQGTVTSMTHNNATFVLHSELERKGKIKPVHVIDVPGHARLKSKLDEVLPQAAGVVFVVDALDFLSSMQASAEYLYDILTKATVVKKRIPVLIFCNKTDKVTAHSKEFIKKQLEKEVNKLRESRNAISSADISDEVQLGLPGEAFNFSQCQNKVIVDEGAGLTGDVSAVEQFIREYVKP

SEQ ID NO: 2211 - protein, 256 aa, Secale cereale
MDEWVRQAEAWAGQAEHWIRQQPPEQIYVAVAVIAVTILVLVAASCLKSSKPNTIVLSGLSGSGKTVLFYQLRDGSSHQGTVTSMTHNNATFVLHSEMERKGKIKPVHVIDVPGHARLKSKLDEVLPQAAGVVFVVDALDFLSSMQAAAEYLYDILTKATVVKKRIPLLIFCNKTDKVTAHSKEFIKKQLEKEVNKLRESRNAISSADISDEVQLGLPGEAFNFSQCQNKVIVDEGAGLTGDVSAVEQFIREYVKP

SEQ ID NO: 2212 - protein, 256 aa, Secale cereale
MDEWVRQAEAWAGQAEHWIRQQPPEQIYVAVAVIAVTILVLVAASFLKSSKPNTIVLSGLSGSGKTVLFYQLRDGSSHQGTVTSMTHNNATFVLHSEMERKGKIKPVHVIDVPGHARLKSKLDEVLPQAAGVVFVVDALDFLSSMQAAAEYLYDILTKATVVKKRIPLLIFCNKTDKVTAHSKEFIKKQLEKEVNKLRESRNAISSADISDEVQLGLPGEAFNFSQCQNKVIVAEGAGLTGDVSAVEQFIREYVKP

SEQ ID NO: 2213 - protein, 257 aa, Hordeum vulgare
MDELVRQAEAWAGQAEHWIRQQPSEQIYVAVAVIAVTILVLVAASCLKSSKPNTIVLSGLSGSGKTVLFYQLRDGSSHQGTVTSMAHNNATFVLHSELERQKGKMKPVHVIDVPGHARLKSKLDEVLPQAAGIVFVVDALDFLSSMQAAAEYLYDILTKATVAKKRIPVLIFCNKTDKVTAHSKEFIKKQLEKEVNKLRESRNAISSADITDEVQIGVPGEAFNFSQCQNKVIVGEGAGLTGDVSAVEQFIREYVKL

SEQ ID NO: 2214 - protein, 485 aa, Setaria italica
MAPFQMRFGLQISPARSDYEEDDEEEEDEEEEYDEMESEGTASPPMTMLRAGRGGGGAGGGLVGAVVGALRRSLVMCSAGAVGDEDDDEEEDGSEGEGIEIGRPTDVRHVSHVTFDRFGGFLGLPADLEPEVPRRTPSASVSVFGVSPTSLQCSYDQRGNSVPTILLMMQRKLYVREGLKIEGIFRINAENSEEVNVRAQLNSGVVPDEVDLHCLAGLIKAWFRELPAGVLDALTPEQVMHCNTEKECALLASMLPPVEAALLDWAINLMADVVEHESHNKMNARNIAMVFAPNMTQMADPLTALIHAVQVMNFLKTLILKTLKERKEAAGAVWALQSCSGSPHDQDEPQMPEHLEKPSVLSSQKDFDFPMIDRATPVQVLGAEKAIHHDSQSRSDEPKKFGIDMDRKKSHSDVSSLGRDLRNRVSGSGREFGNRNTEGLFDRFSFRKGVERLCRHPVFQLSRSMKKSADVVVFDAPREARQAWV

SEQ ID NO: 2215 - protein, 486 aa, Panicum virgatum
MAPFQMRFGLQISPPPSDEEEDDDDGEEEDEEEEYGHETESEGTASPPMTMLRVGRGGGAGGGLVGAVVGALRRSLVMCSAGAVGGEDHDDEEDGSEGERGIEIGRPTDVRHVSHVTFDRFGGFLGLPADLEPDVPRRTPSASVSVFGVSPTSLQCSYDQRGNSVPTILLMMQRKLYIRDGLKIEGIFRINAENSEEVNVRNQLNSGVVPDEVDLHCLAGLIKAWFRELPAGVLDALTPEQVMHCNTEEDCALLASMLPPVEAALLDWAINLMADVVEHESHNKMNARNIAMVFAPNMTQMADPLTALIHAVQVMNFLKTLILKTLKERKEAAGAVQALQSCSGSANDQDEPQMSEHLEKPSVLSNQKDFDFPMIDKATPVQVLGADNALHHYSKSRSSEAKFGIDMDHKKSHSDVSSFGRDLNNRVNVSGREFGNRNAEGLFDRFSFRKGVEKLCRHPVFQLSRSMKKSADVVFDAPREARQAWV

SEQ ID NO: 2216 - protein, 475 aa, Zea mays
MAPFQMRFGLQISPARSDDDEEEDDDDDDEEEYDEMASEGTASPPMMLRPGRGGGGLVSAVVGALRRSLVMCSAGAVDIDDDDDEEEGGIEIGRPTDVHHVSHVTFDRFGGFLGLPADLEPEVPRRTPSASVSVFGVSPTSLQCSYDPRGNSVPTILLMMQRKLYDRGGLKIEGIFRINAENSQEVYVRDQLNSGVVPNEVDLHCLAGLIKAWFRELPSGVLDALTPEQVMHCNTEGGCALLASMLPPVEAALLDWAINLMADVVEQENYNKMNARNIAMVFAPNMTQMADPLTALIHAVQVMNFLKTLILKTLKERNKKDAALQALQPCSSSPNDQDEHQVSEHLEKPSVLPSQKGFGFPMNDSATPVQVLGAEKTLHHHSQIRSHEPKRFGTDMDHKKRQSDASSLLGSDSSNRFNSSGREFGSRNGASDRFSFRKGVERLCRHPVFQLNRSMKKSTDAVVFDAPRETRQAWV

SEQ ID NO: 2217 - protein, 355 aa, Glycine max
MWSTPTRSINYPEMGMFVVAPASSFHPNLHHHHHHHHQPSPNDPAVMVDSLNPATALGVGVIPLLAPTPCHESDNNILGNRTRGGGIQFWQDQQQHNQGNYTKKPQQGLLDHNSNTSSGNLVQNSGGVTASGTSSGGTTCQDCGNQAKKDCTNRRCRTCCKSRGFDCPTHVKSTWVPAARRRERQLMTSATVAPVAGSSGSTSGTKKPRLIASQTTTTSHTSTSNTTPPRSFDTSSSHQDAGFKESLPGQVRAPAVFKCVRVTAVEDGQDEYAYQAVVKIGGHEFKGFLYDQGAENRDVYPNLSELHLGGGNGGSGGAGRNGVSSSSPMMDPNDVYAASGGGLLGGSSAYGNPMN

SEQ ID NO: 2218 - protein, 347 aa, Phaseolus vulgaris
MWPGTNRSINYPEMGMFVVAPASSFHHHHHHQQPPPHDPVMADSLNPATALGVGVIPLLATTPCLEPDNFLGNRTRGGGIQFWQDQTPHQSHYMKKQQQQGLLDQSNTSSGNLVQNSGGLTASGTSSGGTTCQDCGNQAKKDCTNRRCRTCCKSRGFDCPTHVKSTWVPAARRRERQLMTTATVAVAGSSGSTSGTKKPRLIASQTTTTSHTSTSNTTPPRSFDTSSSHQDAGFKESLPGQVRAPAVFKCVRVTAVEDGEDEYAYQAVVKIGGHVFKGFLYDQGVENRDVYPNLSELHLGGGSGSGGSGGMGRNGVSSSPMMDPSDVYAASGGGLLGGSSAYGNPMN

SEQ ID NO: 2219 - protein, 335 aa, Cajanus cajan
MGMFVVAPASSFHHHHQQIPPPHDPVVADSLNPATALGVGVSVIPLLAATPCLESDNILGNRTRGGGIQFWQEPQPPQPHQGHYMKKQHQDLLNHNNNNSSPGNLLQNSGGVTGSGTSSGGTTTCQDCGNQAKKDCVNRRCRTCCKSRGFDCPTHVKSTWVPAARRRERQLMTAATAAVAGSSGSTSGTKKPRLIASQTTTSHTSTSNTTPPRSFDTSSSHQDAGFKESLPGQVRAPAVFKCVRVTAVEDGQDEYAYQAVVKIGGHVFKGFLYDQGVENRDVYPNLSELHLGGGSGSGGSGGRNGVSSSSPMMDPSDVYGGGLLGGSSAYGNPMN

SEQ ID NO: 2220 - protein, 438 aa, Glycine max
MSGKPVRPRTRVGKYELGKTIGEGSFAKVKFAKNVENGNHVAIKILDRNHVLRHKMMEQLKKEISAMKMINHPNVVKIYEVMASKTKIYIVLELVNGGELFDKIAKYGKLKEDEARSYFHQLINAVDYCHSRGVYHRDLKPENLLLDSNAILKVTDFGLSTYAQQEDELLRTACGTPNYVAPEVLNDRGYVGSTSDIWSCGVILFVLMAGYLPFDEPNHATLYQKIGRAQFTCPSWFSPEAKKLLKRILDPNPLTRIKIPELLEDEWFKKGYKPTTFVEEEDVNVDDVAAAFNDSKENLVTERKEKPVSMNAFELISRSQSFNLENLFEKQTQGIVKRETHFTSQRPANEIMSKIEEAAKPLGFNVHKRNYKMKLQGDKSGRKGHLSVATEVFEVAPSLHMVELRKTGGDTLEFHKFYKSFSSSSGLQDIVWHSEAKQ

SEQ ID NO: 2221 - protein, 437 aa, Cajanus cajan
MSAKKPVRPRTRVGRYELGKTIGEGSFARVKFARNVENDSHVAIKILDRNHVLKHKMMEQLQKEISAMKMINHPNVIKIYEVMASKTKIYIVLELVNGGELFDKIATNGRLKEDEARSYFHQLINAVDYCHSRGVYHRDLKPENLLLDSNGILKVSDFGLSTYAHQEDELLRTACGTPNYVAPEVLNDRGYVGSASDIWSCGVILFVLMAGYLPFDEPNHAALYKKIGRAQFACPSWFSPEAKKLLKRILDPNPLTRIKIPELLQDEWFRKGYKPASFTEEEDINVDDVTAAFNDSKEKLVTERKEKPVSMNAFELISRSQSFNLENLFEQQTQGIVKKETHFTSQCPANEIMSKIEEAAKPLGFNVHKRNYKMKLQGDKSGRKGHLSVATEVFEVAPSLHMVELRKTGGDTLEFHKFYKNFSSGLQDVVWHSEATT

SEQ ID NO: 2222 - protein, 436 aa, Phaseolus vulgaris
MSGKPVRPRTRLGKYELGKTIGEGSFAKVKFAKNVENGNHVAIKILDRKHVLSHKMTEQLKKEISAMKMINHPNVVKIYEVMASKTKIYIVLELINGGELFDKIAQDGRLKEDEVRSYFHQLINAVDYCHSRGVYHRDLKPENLLLDSNGILKITDFGLSTYAQKEDELLRTACGTPNYVAPEVLKDRGYVGSTSDIWSCGVILFVLMAGYLPFDEPSQMALYKKIGKAQFTCPSWFSSEAKKLLKRILDPNPLTRIKIPEIIEDEWFKKGYKPAIFTEEEDVNVDDVAAAFNDSKENFVTERKEKPVSMNAFELISRSQSFNLENLFEKETNGIVKKETHFTSQHPANEIMSKIEEAAKPLGFNVHKRNYKMKLQGDKSGRKGHLSVATEVFEVAPSLHMVELRKTGGDTLEFHKFYKTFSSGLQDIVWHSEAKV

SEQ ID NO: 2223 - protein, 437 aa, Trifolium pratense
MMNNNKVPPRPRTRVGKYEMGKTIGEGSFAKVKLAKNVENGDYVAIKILDRNHVLRHNMMDQLKREISAMKIINHPNVVKIFEVMASKTKIYIVLELVSGGELFDKIAKNGRLREDEARSYFQQLINAVDYCHSRGVYHRDLKPENLLLDSNGVLKVSDFGLSTYSQQEDELLRTACGTPNYVAPEVLNDRGYVGSTSDIWSCGVILFVLMAGYLPFDEPTTIALYRKIGRAEFTCPPWFSPEAKKLLKSILNPNPLTRIKIPELLEDEWFKKGYKPASFTEEDDINVDDVAAAFNDSKENLVTETKEKPVSMNAFELISRSQSFNLDNLFERQKGVVKRETHFTSQCPANEIMSKIEEAAKPLGFNVHKRNYKMKLQGDKSGRKGHLSVATEVFEVAPSLHMVELRKTGGDTLEFHKFYKTFSSGLQDIVWHSDKK

SEQ ID NO: 2224 - protein, 437 aa, Trifolium pratense
MMNNNKVPPRPRTRVGKYEMGKTIGEGSFAKVKLAKNVENGDYVALKILDRNHVLRHNMMDQLKREISAMKIINHPNVVKIFEVMASKTKIYIVLELVSGGELFDKIATNGRLKEDEARSYFQQLINAVDYCHSRGVYHRDLKPENLLLDSNGVLKVSDFGLSAYSQQEDELLRTACGTPNYVAPEVLNDRGYVGSTSDIWSCGVILFVLMAGYLPFDEPTTIALYRKIGRAEFTCPPWFSPEAKKLLKAILNPNPLTRIKIPEILEDEWFKKGYKPACFTEGDDINVDDVAAAFNDSKENLVTETKEKPVSMNAFELISRSQSFNLDNLFEKQKGIVKRETHFASQCPANEIMSKIEEAAKPLGFNVHKRNYKMKLQGDKSGRKGHLSVATEVFEVAPSLHMVELRKTGGDTLEFHKFYKTFSSGLQDIVWHSDKK

SEQ ID NO: 2225 - protein, 437 aa, Trifolium pratense
MMMNNKVPPRPRTRVGKYELGKTIGEGSFAKVKLAKNVENGDYVALKILDRNHVLRHNMMDQLKREISAMKIINHPNVVKIFEVMASKTKIYIVLELVSGGELFDKIATNGRLKEDEARSYFQQLINAVDYCHSRGVYHRDLKPENLLLDKNGVLKVSDFGLSTYSQQEDELLRTACGTPNYVAPEVLNDRGYVGSTSDIWSCGVILFVLMAGYLPFDEPTTIALYRKIGRAEFTCPPWFSPEAKKLLKAILNPNPLTRIKIPEILEDEWFKKGYKPACFTEGDNINVDDVTAAFNDSKENLVTETKEKPVSMNAFELISRSQSFNLDNLFEKQKGVVKRETHFASQCPANEIMSKIEEAAKPLGFNVHKRNYKMKLQGDKSGRKGHLSVATEVFEVAPSLHMVELRKTGGDTLEFHKFYKTFSSGLQDIVWQSDKK

SEQ ID NO: 2226 - protein, 433 aa, Lupinus angustifolius
MSKKAPKPRTRVGKFELGKTIGEGSFAKVKLARNVDSRDHVAIKILDRNHVLRHNMMEQAQISAMKLINHPNVVKIFEVMASKTKIYIVLELVNGGELFDKIATNGKLKEDEARSYFHQLINAVDYCHSRGVYHRDLKPENLLLDSNGVLKVSDFGLSTYAQQEDELLRTACGTPNYVAPEVLKDRGYVGSASDIWSCGVILFVLMAGYLPFDEPNHVALFRRISRADFSFPSWFAPKLKKLLKRILDPNPLTRIKIEELLEDEWFKKGYKPASFTEEEDVNVDDVAAAFNDSKDNLVTERKEKPVSMNAFELISRSQSFNLNSLFEKQTGVVKRETHFTSQHPANEIMSKIEEAAKPLGFNVHKRDYKMKLQGDKSGRKGHLSVATEVFEVAPSLHMVELRKTGGDTLEFHKFYKNFSSGLQDIVWHADEEK

SEQ ID NO: 2227 - protein, 435 aa, Medicago truncatula
MSNKVPPRPRTRVGKYEMGKTIGEGSFAKVKLAKNVENGDYVAIKILDRNHVLKHNMMDQLKREISAMKIINHPNVIKIFEVMASKTKIYIVLELVNGGELFDKIATHGRLKEDEARSYFQQLINAVDYCHSRGVYHRDLKPENLLLDTNGVLKVSDFGLSTYSQQEDELLRTACGTPNYVAPEVLNDRGYVGSSSDIWSCGVILFVLMAGYLPFDEPNLIALYRKIGRADFKCPSWFSPEAKKLLTSILNPNPLTRIKIPEILEDEWFRKGYKPACFTEEEDVNVDDVAAAFNDSKENLVTETKEKPVSMNAFELISRSESFNLGNLFEQEKGVVKRETHFTSQRPANEIMSKIEEAAKPLGFNVHKRNYKMKLQGDKSGRKGHLSVATEVFEVAPSLHMVELRKTRGDTLEFHKFYKTFSSGLQDIVWNTDKK

SEQ ID NO: 2228 - protein, 434 aa, Lupinus angustifolius
MTTKAPRPRIRVGKYELGKTIGEGSFAKVKLARNVDTRDHVAIKILDREHVLRHNMMEQARKISAMKLINHPNVVKIFEVMASKTKIYIVLELVRGGELFDKIASSGKLKEDEARSYFQQLINAVDYCHSRGVYHRDLKPENLLLDTNGVLKVSDFGLSTYAQQEDELLRTACGTPNYVAPEVLRDRGYVGSASDIWSCGVILFVLMAGYLPFDEPNHAALFRKISRADFSFPSWFAPESKKLLKRILNPDPLARIKIEELLEDEWFKKGYKPASFTEEEGVNVDDVAAAFNDSKENLVTERKEKPVSMNAFELISRSQGFNLDSLFEKQTGVVKRETHFTSQRPANEIMSKIEEAAKPLGFNVHKRDYKMKLQGDKSGRKGHLSVATEVFEVAPSLHMVELRKTGGDTLEFHKFYKNFSSGLQDIVWNAEEKK

SEQ ID NO: 2229 - protein, 435 aa, Cajanus cajan
MSVKVATGRIRVGKYELGKTIGEGSFAKVKFARDVDNGNHVAIKILDRKHVLRHNMTEQLMREISTMKLINHPNVIKIFEVMASKTKIFIVLELVNGGELFDKIASNGRLKEDEARNYFQQLINAVDYCHSRGVYHRDLKPENLLLDSNSVLKVSDFGLSTYSQKEDELLRTACGTPNYVAPEVLKDRGYVGSTSDIWSCGVILFVLMAGYLPFDEPTHMALYRKIGMAKFSCPSWFPPQAKKLLKRILDPNPLTRIKIPELLEDEWFKKGYKQASFTEEEDLSVEDVAVAFNVSNENLVTERKEKPVYMNAFELISGSQSFNLDSLFEKQKDQVKRETRFTSQCPANEIMFKIEEAAKPLGFNVQKQNYKMKLQGDKSGRKGHLSVATEVFEVAPSLHMVELRKTRGDTLEFNKFYKIFSSGLQDIVWHTEPKK

SEQ ID NO: 2230 - protein, 451 aa, Arachis hypogaea
MSSSKSNKKGGRGGGAPPPPRAPARTCVGKYELGKTIGEGSFAKVKFAKNVENGDHVAIKILDKSHVLKHKMIEQLKKEISAMKLINHPNVVRIFEVMASKTKIYIVLELVNGGELFDKIARYGRLKEDEARSYFQQLINAVDYCHSRGVYHRDLKPENLLLDSNGVLKVSDFGLSTYAQREDELLRTACGTPNYVAPEVINDRGYVGSASDIWSCGVILFVLMAGYLPFDEPNQMALYKKIEKAQFTCPSWFSPEAKKILKRILDPNPLARIKIPELLRDEWFRKGYKPPSFTEEEDVNVDDVAAAFDDSKENLVTERKEKPVSMNAFELISRSQSFNLDSLFEQQTGVVKRETHFTSQHPPNEIMSKIEEAAKPLGFNVRKRNYKMRLQGDKSGRKGHLSVATEVFEVAPSLHVVELRKTGGDTLEFHKFYKNFSSGLQDIVWHTEEKI

SEQ ID NO: 2231 - protein, 451 aa, Arachis hypogaea
MSSSKSNKKGGRGGGAPPAPRAAARTCVGKYELGKTIGEGSFAKVKFAKNVENGDHVAIKILDKSHVLKHKMIEQLKKEISAMKLINHPNVVRIFEVMASKTKIYIVLELVNGGELFDKIARYGRLKEDEARSYFQQLINAVDYCHSRGVYHRDLKPENLLLDSNGVLKVSDFGLSTYAQREDELLRTACGTPNYVAPEVINDRGYVGSASDIWSCGVILFVLMAGYLPFDEPNQMALYKKIEKAQFTCPSWFSAEAKKILKRILDPNPLTRIKIPELLRDEWFRKGYKPPSFTEEEDVNVDDVAAAFDDSKENLVTERKEKPVSMNAFELISRSQSFNLDSLFEQQTGVVKRETHFTSQHPPNEIMSKIEEAAKPLGFNVRKRNYKMRLQGDKSGRKGHLSVATEVFEVAPSLHVVELRKTGGDTLEFHKFYKNFSSGLQDIVWHTEEKI

SEQ ID NO: 2232 - protein, 440 aa, Glycine max
MSSMKVAKGRILVGKYELGKTIGEGSFAKVKFARNVQNGNYVAIKILDRKHVLRLNMMEQLMKEISTMKLINHPNVVRILEVLASKTKIYIVLEFVDGGELFDKIAANGRLKEDEARNYFQQLINAVDYCHSRGVYHRDLKPENLLDSNGVLKVSDFGLSTYSQKEDELLHTACGTPNYVAPEVLNDRGYVGSTSDIWSCGVILFVLMAGYLPFDEPTHMALYKKIGRAEFSCPSWFSPQAKKLLKHILDPNPLTRIKIPELLEDEWFKKGYKPTSFTEEEDLNVDDVVVAFNESNENLVTERKEKPVSMNAFELICRSQSFNLDSLFEKQTGQVKQETSFTSQCPANEIMFKIEEAAKPLGFNVYKRNYKMKLQGDKSGRKGHLSVATEVFEVAPSVHMVELRKTGGDTLEFHKFYKIFSSGLQDIVWHDTEGKKNMKN

SEQ ID NO: 2233 - protein, 447 aa, Solanum phureja
MIEPKKQSKNRGFYVRMKLLNHNNGGNRNRGLFCYRYFKWVLWFSLSFYFFASFLFNHKPNTISKTTVPQYSKASRALIEYPETQNHRDSLNGLKIYVYDLPSKYNSDWLSNERCSNHLFASEVAIHKALLNSDVRTFDPFEADFFFVPVYVSCNFSTVNGFPAIGHARSLISSAIKLISSEFTFWNRSSGSDHIFVASHDFGSCFHTLEDVAMADGVPEFLRKSIILQTFGVKYDHPCQKAEHIVIPPYISPESVRKTLATSDVNGRRDIFAFFRGKMEVHPKNVSGRFYSKKVRTVILKKYGNDRRFYLRRHRFIGYQSEILRSTFCLCPLGWAPWSPRLVESVVLGCVPVIIADGIDLPFSSAVPWSEISVTVAEKDVGKLGTILENVAATNLSTIQQKLWDPRISRALLFHDRTVEGDATWQVLHALTEKLSRSHHRSRVLSE

SEQ ID NO: 2234 - protein, 449 aa, Solanum tuberosum
MIEPKKQSKNRGFYVRMKLLNHNNGGNRNRGLFCYRYFKWVLWFSLSFYFFASFLFNHKPNTISKTTVPQYSKASRALIEYPETQNHRVSDSLNGLKIYVYDLPSKYNSDWLSNERCSNHLFASEVAIHKALLNSDVRTFDPYEADFFFVPVYVSCNFSTVNGFPAIGHARSLISSAIKLISSEFTFWNRSSGSDHIFVASHDFGSCFHTLEDVAMADGVPEFLRKSIILQTFGVKYDHPCQKAEHIVIPPYISPESVRKTLATSDVNGRRDIFAFFRGKMEVHPKNVSGRFYSKKVRTVILKKYGNDRRFYLRRHRFIGYQSEILRSTFCLCPLGWAPWSPRLVESVVLGCVPVIIADGIDLPFSSAVPWSEISVTVGEKDVGKLGTILENVAATNLSTIQQKLWDPRISRALLFHDRTVEGDATWQVLHALTEKLSRSHHRSRVLSE

SEQ ID NO: 2235 - protein, 459 aa, Nicotiana benthamiana
MLEPKRTNNRNRGFYVRMRLLHNNGRNVRTSEKSFCYRYFKWLLWFSLSFYFFASFLFNHKPNNTISFISTTTVSQSKASRALIESINSSAVLQYPKHHQDSLNGLKIYVYELPSKYNSDWLSNERCSNHLFASEVAIHRALLNSDVRTFDPWEADFFFVPVYVSCNFSTVNGFPAIGHARSLIGSAVELISSQFPFWNRSLGSDHVFVASHDFGACFHTLEDVARADGIPEILRNSIILQTFGVKYDHPCQRAEHVVIPPYVSPESVRKTLATSDVNGKRDIFAFFRGKMEVHPKNVSGRYYSKKVRTVILQKYGNDRRFYLTRHRFAGYQSEILRSTFCLCPLGWAPWSPRLVESVVLGCVPVIIADGIELPFSSAVPWADISVTVAEKDVGKLGSILEHVASTNLSIIQQKLWDPRITRSLLFHDRTVEGDATWQVLHALTQKLNKSHHRSRVSNE

SEQ ID NO: 2236 - protein, 371 aa, Solanum tuberosum
MKSSTTVILLLVLLCAVSNISFAVIDGLLKNGNFEMPPSKADLNGTEVLKHNAIPEWSISGFVEYIKAGQKQGDMLLVVPEGYAAVRLGNEASIKQILNVTKGMYYSLTFSAARTCAQEERINVSVTPDFGVLPIQTLYSSSGWDSYAWAFQAELHQVEILLHNPGVEEDPACGPLIDSIAIRTLYPPRATNQNLLKNGDFEEGPYIFPNTSWGVLVPPNIEDDHSPLPAWMVESLKAVKYLDSDHFSVPHGKRAIELVAGKESAIAQVARTTIGKMYQLSFKVGDASNACEGSMIVEAFAGRDTLKVPYESMGKGGYKRAILRFKATASRTRIMFLSTYYHTRSDDFVSLCGPVVDDVTLLSVRTHRRVL

SEQ ID NO: 2237 - protein, 371 aa, Solanum phureja
MKSSTTVILLLVLLCAVSNISFAVIDGLLKNGNFEIPPSKADLNGTEVLKHNAIPEWSISGFVEYIKAGQKQGDMLLVVPEGYAAVRLGNEASIKQILNVTKGMYYSLTFSAARTCAQEERINVSVTPDFGVLPIQTLYSSSGWDSYAWAFQAELHQVEILLHNPGVEEDPACGPLIDSIAIRTLYPPRATNQNLLKNGDFEEGPYIFPNTSWGVLVPPNIEDDHSPLPAWMVESLKAVKYLDSDHFSVPHGKRAIELVAGKESAIAQVARTTIGKMYQLSFKVGDASNACEGSMIVEAFAGRDTLKVPYESMGKGGYKRAILRFKATASRTRIMFLSTYYHTRSDDFVSLCGPVVDDVTLLSVRTHRRVL

SEQ ID NO: 2238 - protein, 371 aa, Solanum melongena
MKSSSIAILLVVLLCAASNISLAVIDGLLKNGNFEMPPSKSDLNGTIVLKHNAIPEWSISGFVEYIKAGQKQGDMLLVVPEGYAAVRLGNEASIKQVLNVTKGMYYSLTFSAARTCAQEERINVSVTPDFGVLPIQTLYSSSGWDSYAWAFQAELHQVEILLHNPGVEEDPACGPLIDSIAIRTLYPPRATNQNLLKNGDFEEGPYIFPNTSWGVLVPPNIEDDHSPLPAWMVESLKAVKYLDSDHFSVPHGKRGIELVAGKESAIAQVARTTIGKMYQLSFKVGDASNACEGSMIVEAFAGRDTIKVPYESKGKGGYKRAILRFKATANRTRIMFLSTYYHTRSDDFVSLCGPVVDDVLLLSIRNHRHYL

SEQ ID NO: 2239 - protein, 368 aa, Nicotiana tabacum
MKVLLLLLVLLCAIFNISLALTDGLLKNGNFEMPLAKADLNGTVVLKHNAIPEWSISGFVEYIKAGQKQGDMLLVVPEGYAAVRLGNEASIKQVLNVTKGMYYSLTFSAARTCAQEERINVSVTPDFGVLPIQTLYSSSGWDSYAWAFQAEFSQVEVLLHNPGVEEDPACGPLIDSVAIRTLYPPRATNKNLLKNGDFEEGPYIFPNTSWGVLVPPNIEDDHSPLPAWMVESLKAVKYLDSDHFSVPQGKRAIELVAGKESAIAQVARTTIGKMYELSFKVGDASNSCEGSMIVEAFAGRDTLKVPYESKGKGGFKRAVLRFKANANRIRIMFLSTYYHTRSDDFVSLCGPVVDDVKLLSVRNPRRFL

SEQ ID NO: 2240 - protein, 374 aa, Nicotiana benthamiana
MKNSRTKSLSLLLLVLLCAIFNISLSLTDGLLKNGNFEMPLAKGDLNGTVVLKHNAIPEWSISGFVEYIKAGQKQGDMLLVVPEGYAAVRLGNEASIKQVLNVTKGMYYSLTFSAARTCAQEERINVSVTPDFGVLPIQTLYSSSGWDSYAWAFQAEFSQVEVLLHNPGVEEDPACGPLIDSIAIRSLYPPKATNKNLLKNGDFEEGPYIFPNTSWGVLVPPNIEDDHSPLPAWMVESLKAVKYLDSDHFSVPQGKRAIELVAGKESAIAQVARTTIGKMYELSFKVGDASNSCEGSMIVEAFAGRDTLKVPYESKGKGGYKRAVLRFKAAANRTRIMFLSTYYHTRSDDFVSLCGPVVDDVKLLSVRNPRRFL

SEQ ID NO: 2241 - protein, 336 aa, Capsicum annuum
MPLSKGDLNGTVVLKHNAIPEWSISGFVEYIKAGQKQGDMLLVVPEGYAAVRLGNEASIKQILNVTKGMYYSLTFSAARTCAQEERINVSVTPDFGVLPIQTLYSSSGWDSYAWAFQAEISRVEILLHNPGVEEDPACGPLIDSIAIRTLYPPRATNQNLLKNGDFEEGPYILPNTSWGVLVPPNIEDDHSPLPAWMVESLKAVKYLDSDHFSVPHGKRAIELVAGKESAIAQVARTTIGKMYQLSFKVGDASNACEGSMIVEAFAGRDTLKVPYESRGKGGYKRAILRFKATASRTRIMFLSTYYHTRSDDFVSLCGPVVDDVTLLSIRSHNRFL

SEQ ID NO: 2242 - protein, 366 aa, Ocimum basilicum
MGAFTLLSVLFFLSTSHAFRDGLLDNGNFELAPSASDLNGTIVLKPHAIPKWQTSGFVEYIKAGQKQGDMLLVVPEGYAAVRLGNEASIKQLLNVTKGMYYSLTFSAARTCAQEEMVNVSVAPDFGVLPIQTLYSSNGWDSYAWAFKAFSSVAEILIHNPGVEEDPACGPLIDSIAIRALYPPRPTNQNLLKNGDFEEGAYIFPNTSWGVLIPPNIEDDNSALPAWMVESLKAVKYIDAAHFSVPHGQRAIELVGGKESAIAQVARTTVGKTYQLTFAVGDASNACEGSMIVEAFAGRDTVKVPYESKGKGGYKRAVLRFVATATRTRIMFLSTYYHTRSDDHASLCGPVVDDVKLLSVRNPRSLA

SEQ ID NO: 2243 - protein, 658 aa, Solanum phureja
GNAELQPLMDLKASLDPENALLTSWTVSGNPCDGSFEGIACNEKGQVANISLQGKGLKGKLSPAIAGLTHLTGLYLHYNSLYGEIPREISNLVELTDLYLNVNDLSGEIPQELGTMSKLQVLQLCYNHFTGSIPTQLGTLTKLNVLALQSNQLTGAIPASLGDLGVLMRVDLSYNSLFGSIPSKLADAPLLEVLDIRNNKISGNVPLALKRLVGGFQYENNPGLCGVGFPSLRVCTSLDRSNPNRPEPYGVGSSGLSTRDIPETANLNLNCSGNACTTSSKTSQASVVVGVIVVTIIASAIGILSFTHYRRRKQKLGGGLEMCDSRLSIDQAKEVNRKNGSPLVSLEYSIGWDPLAEGRRYGGVSQEILQRYRFNLEEVESATQYFADKNLLAKSNFSTTYRGTLRDGSLVAVTRIAKISCKSEEAEFLRGLNILTSLRHDNLVRLRGFCCSKSRGECFLVYDFVPRGNLLHYLDLKEDEAHALEWSTRVSIISGTAKGVEYLHGCKVNKPALVHQNICAENVLLDQRFKPLLSNSGLHKLLTNDTVFSTLKASAAMGYLAPEYSTTGRFTERSDIYAFGVLIFQILSGKRKFTSSMRAAAESSKFHDLMDVNLRGRFSESEATKLAKIALLCTHECPEERPTMETIVREIGNLASPS

SEQ ID NO: 2244 - protein, 679 aa, Capsicum annuum
MGFPPLLLCFLLILFAVSVTGNDELRALMDLKASLDPENALLTSWTVSGDPCDGSFEGVACNDRGQVANISLQGKRLKGKLSPAIGELPHLTGLYLHYNALYGEIPREISKLIELTDLYLNVNNLSGEIPPELGNMSSLQVLQLCYNHFTGSIPTQLGTLKELNVLALQSNQLTGAIPASLGDLGVLMRVDLSSNHLFGSIPSKLADAPLLAVLDIQNNRLSGNVPLALKRLVEGFQYENNPGLCGVGFPSLRVCTSLDRSNPNRPEPYGGGLSGLTTRDIPETANLNLNCSRNGCSKSSKTSQASVLVGVILVTVIASAIGILSIVHYRRRKQKLGGGLEMCDSRLSIDQAKEVNRKNGSPLVSLEYSIGWDPLAEGRRYVGVSQEILQRYRFNLEEVESATQYFADKNLLSKSSFSTTYRGTLRDGSLVAVTRITKISCKSEEAEFLRGLNILTSLRHENLVRLRGFCCSKGRGECFLVYDFVPRGNLLHYLDVKEDEARALEWSTRVSIIGGTAKAGIEYLHGCKVNKPALVHQNICAENVLLDHRFNPLLSNSGLHKLLTNDTVFSALKASAAMGYLAPEYSTTGRFTERSDIYAFGVLIFQILSGKRKFTSSMRAAAESSKFHDLMDTNLRGRFFESEAAKLAKTALLCTHECPEERPTMETIVRELGNLANSS

SEQ ID NO: 2245 - protein, 681 aa, Nicotiana benthamiana
MTFPQFLCFLLTLFIFFSPQPIYGNNELQALMDLKASLDPENALLISWTVSGNPCDGFFEGVACNEKGQVANISLQGKRLSGKLSPAIARLSHLTGLYLHYNSLNGEIPREISSLIELTDLYLNVNNLSGEIPPELGNMSSLQVLQLCYNQFSGSIPTQIGTLKKLNVLALQSNQLTGAIPASLGELGVLMRVDLSSNHLFGSIPSKLADAPLLEVLDIRSNKLLGNVPLALKRLVGGFQYENNPGLCGVGFPSLRVCTSLDRSNPNRPEPYGGASSGLSTRDIPETANLNLNCSGNGCAKSSKTSQASVVVGVIVVTVIASTIGALTFTHYRRRKQKLGGGLDICDSRLSTDQTKEVNRKNGSPLVSLEYSSGWDPLAEGRRYGGVSQEVLQSYRFNLEEVESATQYFADKNRLAKSSFSTTYRGTLRDGSLIAVTRITKISCKSEEAEFLRGLNILTSLRHENLVRLRGFCCSKIRGECFLVYDFVPRGNLLHYLDVKEDEARALEWSTRVSIISGTAKGLEYLHGCKVNKPALVHQNICAENVLLDQRFKPLLSNSGLHKLLTNDIVFSALKASAAMGYLAPEYSTTGRFTEKSDIYAFGVLIFQILSGKRKFTSSMRAAAESCKLHDLMDANLRGRFSESEAAKLAKIALICTHECPEERPTMETIVRELGNLAIFS

SEQ ID NO: 2246 - protein, 310 aa, Secale cereale
MEAATSNPSSKRIALVTGGNKGVGLETCRQLASKGLKVVLTARNEARGLEAVEGVRRSGGGGQSDVVFHQLDVTDPDSVARLADFVRDQFGKLDILINNAGISGVDRDPVLVAKVKEQVESMDVDQRVQWMKENSKETYEEAKECMRTNYYGAKLVTEALLPLLQLSSSGRIVNVSSGFSLLRNFNSEELKNEFNDVDNLTEKKLEELLDSFLEDFKANLIEAHGWPTGGSSAYKVAKAALNAYTRILAKRFPAMRINCLTPGYVKSDMSMHMGVLTPEEGASNPVKVALLPDDGPTGAYFDRDGVASFV

SEQ ID NO: 2247 - protein, 310 aa, Secale cereale
MEAATSNPSSKRIALVTGGNKGVGLETCRQLASKGLKVVLTARNEARGLEAVEGVRRAGAGGQSDVVFHQLDVTDPDSVARLADFVRDQFGKLDILINNAGISGVDRDPVLVAKVKEQVESMDVDQRVQWMKENSKETYEEAKECMRTNYYGAKLVTEALLPLLQLSSSGRIVNVSSGFSLLRNFNSEELKNEFNDVDNLTEKRLEELLDSFLEDFKANLIEAHGWPTGGSSAYKVAKAALNAYTRILAKRFPAMRINCLTPGYVKSDMSMHMGVLTPEEGASNPVKVALLPDDGPTGAYFDRDGEASFV

SEQ ID NO: 2248 - protein, 311 aa, Lolium multiflorum
MEPAAASNPSSKRIAVVTGGNKGVGLETCRQLASRGLRVVLTARNEARGLEAVEGVRRPGGGGQSDVVFHQLDVTDPASVGRLADFVKNQFGKLDILINNAGISGVDRDPALVAKVKEQVESMDVDQRVQWMKENSKETYEEAKECMRTNYYGAKLVTEALLPLLQLSSCGRIVNVSSGFALLRNFNSEELKKEFDDIDNLTEKRLDELLDLFLEDFKANLIEAHGWPTGGSSAYKVAKAALNAYTRILAKKYPTMRINCLTPGYVKTDMSMHMGILTPEEGASNPVKVALLPDDGPTGAYFDRNGEASYV

SEQ ID NO: 2249 - protein, 312 aa, Avena sativa
MEPAANSKDPSSKRIALVTGGNKGVGLETCRQLASRGLRVVLTARSEARGLEAVEGVRRSGGDGQADVVFHQLDVTDPDSVGRLADFVRDQFGKLDILINNAGISGVDRDPALVAKVKEQVESMDVDQRVQWMKENSKETYEEAKECMRTNYYGAKLVTEALLPLLQLSSSGRIVNVSSGFALLRNFNSEELKKEFDDIDNLTEKRLDELLDLFLEDFKANLIEAHGWPTDGSSAYKVAKAALNAYTRILARKHPTMRINCLTPGYVKTDISMHMGVLTPEEGASNPVKVALLPDDGPTGAYFDRNGEASFV

SEQ ID NO: 2250 - protein, 309 aa, Brachypodium distachyon
MAAISNPSSKRIALVTGGNKGIGLETCRQLASRGLKVVLTARNEARGLEAVDGIRRSGGAGQPDVVFHQLDVTDPSSIDRLADFVRDQFGRLDILINNAGISGVDRDPVLFAKFKEQVESMDVDQRVQCMKENSKETYEEAKECMRTNYYGAKLVTEALLPLLQLSSSGRIVNVSSGFGLLRNFNSEELKKEFNDIDNLAEKRLDEQLDLFLEDFKAKLIEAHGWPTGGSSAYKVVKAGLNAYTRILAKKFPTMRINSLTPGYVKTDMSMHMGVLTPEEGASNVVMVSLLPDDGPTGAYFDRDGEASFV

SEQ ID NO: 2251 - protein, 307 aa, Setaria italica
MDATISNPSIKRIALVTGGNKGVGLETCRQLATKGLKVVLTARNEARGLEALEAIRRSGGVAEVFFHQLDVTDPSSAARLADFVRGQFGRLDILINNAGISGVDRDPVLVAKVKDQVESMDVNQRVEWMRENSKETYEEAKQCMRTNYYGAKIVTEALLPLLQLSSSGRIVNVSSGFGLLRNFNSEELRKEFDDIDNLTEKRLEELLDLFLEDFKANLLEAHGWPTGGSSAYKVAKAALNAYTRILAKYPTLRINCLTPGYVKTDMSMHMGVLTLEEGARNPVKVALLPDDGPTGAYFDLNGEASFV

SEQ ID NO: 2252 - protein, 308 aa, Cenchrus ciliaris
MDAAVSNLSIKRIALVTGGNKGVGLETCRQLAAKGLKVVLTARNEARGLEAVEAIRRSSAAAEVFFHQLDVTDPSSAARLADFVRGQFGRLDILINNAGISGVYRDPVLVAKVKDQVESMDVNQRVEWMRENSKETYEEAKQCMETNYYGAKIVTEALLPLLQLSPSGRIVNVSSGFGLLRNFNSEELRKEFDDIDNLTEKRLEELLDLFLEDFKANLVEAHGWPTGGSSAYKVAKAALNAYTRILAKKYPTLRINCLTPGYVKTDISMHMGVLTLEEGARNPVKVALLPDDGPTGAYFDLNGEAPFV

SEQ ID NO: 2253 - protein, 308 aa, Pennisetum glaucum
MDAAVSNQSITRIALVTGGNKGVGLETCRQLATKGLKVVLTARNEARGLEAVEAIRRSSAAAEVFFHQLDVTDPSSAARLADFVRDQYGRLDILINNAGISGVHRDPVLVAKVKDQVESMDVNQRVEWMRENSIETYEEAKQCMKTNYYGAKIVTEALLPLLQLSSCGRIVNVSSGFGLLRNFNSEELRKEFDDIDNLTEKRLEELLDLFLEDFKANLVEAHGWPTGGSSAYKVAKAALNAYTRILAKKYPTLRINCLTPGYVKTDISMHMGVLTVEEGARNPVKVALLPDDGPTGAYFDLNGEAPFV

SEQ ID NO: 2254 - protein, 330 aa, Brachypodium distachyon
MNHLPQSSRVQCSPQAAATRKMAAISNTSSKRIALVTGGNKGVGLETCRQLASRGLKVVLTARNEARGLEAVDGIRRSGGPGQPDVVFHQLDVTDTSSIDRLADFVRDQFGRLDILINNASISGVDRDPVLVAKVKEQVESMDVNQRVQWMKENSKETYEEAKECMRTNYYGPKLVTEALLPLLQLSSSGRIVNVSSGFGLLRNFNSEELKKELNDIDNLTEKRLDELLDLFLEDFKANLIEAHGWPTGGSSAYKVAKAALNAYTRILAKKFPTMRINCLTPGYVKTDISMHMGVLTPEEGASNPVKVSLLPDDGPTGAYFDRDGEASFV

SEQ ID NO: 2255 - protein, 313 aa, Zea mays
MDAAAAAAAAASPTSKRIALVTGGNKGIGLETCRQLASRGVRVVLTARNEARGLEAVERVRCARGDAEVYFHQLDVTDPCSAARLADFVRDQFGRLDILINNAGISGVHRDPVLSAAVKDKVDGMDVNQRVEWMKENSKETYEEAVQCMKTNYYGAKLVTEALLPLLQLSSSGRIVNVSSGFGLLRNFNSEDLRKEFEDIDNLTESRLEELMDKFLEDFKANLVEEHGWPTGGSSAYKVVKAALNAYTRILAKKYPTLRINCLTPGYVKTDMSMHMGVLTLEEGARNPVKVALLPDDGPTGAYFDLNGEASFV

SEQ ID NO: 2256 - protein, 337 aa, Oryza sativa
MNHLLGRGVHIPRPAAANRGGTTTMEAAAISNPPSKSIIRIALVTGGNKGVGLETCRQLASRGLRVVLTARNEARGLEAVDGIRRSGAADSDVVFHQLDVTDAASVARLADFVRDQFGRLDILINNAGISGVDRDPVLVAKVKDQIEGMDVDQRVEWMRENSKETYDEAKSCITTNYYGAKLVTEALLPLLLLSSSGRIVNVSSGFGLLRNFNSEDLRKEFDDIDSLTEKRLEELLDLFLDDFKVNLIEAHGWPTGGSSAYKVAKAALNAYTRILAKKYPTLRINCLTPGYVKTDISMHMGVLTPEEGASNSVKVALLPDDGPTGAYFDRNGEASFV

SEQ ID NO: 2257 - protein, 470 aa, Leymus cinereus x Leymus triticoides
MAASSAPLSFSASALSARLRLAAPASCAATTRRCRPVVVRAKIREIFMPALSSTMTEGKIVSWTAAEGDRVTKGDAVVVVESDKADMDVETFYDGIVAAVLVPAGESAPVGAPIALLAESEEEVALAVAQAQALSSPQPQQAPPLSDAAASPPPPPPPAAPVAAPPPVATGTTGLATPQAKKLAKQHRVDLAKVIGTGQFGRITPADVEASAGIQPKPKVPPTPAAAPVAAQSVRAVRQAAALPPVPGATVVPFTAMQAAVSKNMVESLSVPAFRVGYPILTNKLDELYEKVKPKGVTMTVLLAKAAAMALAQYPVVNASCRDGTSFTYNSSINIAVAVAIDGGLITPVLEQADKLDVYLLSQKWKELVKKARAKQLQPNEYNSGTFTLSNLGMFGVDRFDAILPPGQGAIMAVGASKPTVVADKDGFFSVKSKMLVNVTADHRIVYGADLAAFLQTFAKIIEDPESLTL

SEQ ID NO: 2258 - protein, 471 aa, Brachypodium distachyon
MAATPAPLSLSASALSARLRLAAPASRAASARRRGPMVVRAKIREIFMPALSSTMTEGKIVSWSAAEGDRVTKGDAVVVVESDKADMDVETFYDGIVAAVLVPAGESAPVGAPIALLAESEEDVALAVAQAQALSSGQAQQAPPSDADAPPPPSPPPAAAAPVAAPAPVAAGTKGVATPQAKKLAKQHRVDLAKVTGTGQFGRITPADVEAAAGIQPKPKVAPPTAAAPVAAPSVRAVPQASVLPPVPGATVVPFTAMQAAVSKNMVESLSAPAFRVGYPILTDKLDELYEKVKPKGVTMTVLLAKAAAMALAQYPVVNASCRDGASFTYNSSINIAVAVAIDGGLITPVLEQADKLDIYLLSQKWKELVKKARAKQLQPNEYNSGTFTLSNIGMFGVDRFDAILPPGQGAIMAVGASKPTVTADKDGFFSIKNKMLVNVTADHRIVYGADLAAFLQTFAKIIEDPESLTL

SEQ ID NO: 2259 - protein, 470 aa, Avena sativa
MAAPPAPLSLSASALSARLRLAAPASRAATARRRGPMVVRAKIREIFMPALSSTMTEGKIVSWTAAEGDRVNKGDAVVVVESDKADMDVETFYDGIVAVVLVPAGESAPVGAPIALLAESDEDVALALAQAQALSSGQPQQASPPSDAAAPPSPPPPAEAPVADPAPVSAGTKGIATPQAKKLAKQHRVDLAKVTGTGQFGRITPADVEAAAGIQPKPKVAPTPAAAPLAAPSVKAVPQAAVLPPVPGATVVPFTAMQAAVSKNMVESLSVPTFRVGYPILTDKLDELYEKVKPKGVTMTVLLAKAAAMALAQYPVVYASCGDGSSFTYNSSINIAVAVAIDGGLITPVLEQADKLDIYLLSQKWKELVKKACAKQLQPNEYNSGTFTLSNLGMYGVDRFDAILPPGQGAIMAVGASKPTVVADKDGFFSVKNKMLVNVTADHRIVYGADLAAFLQTFAKIIEDPESLTL

SEQ ID NO: 2260 - protein, 443 aa, Secale cereale
TPTARRRRPVVVRAKIREIFMPALSSTMTEGKIVSWAAAEGDRVAKGDAVVVVESDKADMDVETFYDGIVAAVLVPAGESPPVGAPIALLAESEEDVALAVAQAKALSSGQPQQQAPAPSDADASPPPPAAPVAAAPAPVAAGTKGVATPQAKKLAKQHRVDLAKVTGTGQYGRITPADVEAAAGIQPKTKVAPTPAAAPVAAASSVRAVPQAAVLPPVPGATVVPFTAMQAAVSKNMVESLSVPAFRVGYPILTDKLDALYEKVKPKGVTMTVLLAKAAAMALAQHPVVNASCRDGTSFTYNSSINIAVAVSIDGGLITPVLEQADKLDIYLLSQKWKELVKKARAKQLQPNEYNSGTFTLSNLGMFGVDRFDAILPPGQGAIMAVGASKSTVVADKDGYFSVKSKMMVNVTADHRIVYGADLAAFLQTFAKIIEDPESLTL

SEQ ID NO: 2261 - protein, 475 aa, Oryza sativa
MATTPAPVSLSAAASTVPARLLVGRGAAAAPVARRRARMVVVRAKIREIFMPALSSTMTEGKIVSWSAAEGDRVAKGDAVVVVESDKADMDVETFHDGIVAAVLVPAGESAPVGAPIALLAESEDDLQAALAKAQELSKAHPQQAPPPSDAAAPPPPPPPPAAAPAAPAPVAAGTKGIATPQAKKLAKQHRVDLAKVAGTGPFGRITPADVEAAAGIEPKPKVVPAASAAPVPLSAPAIGAVPQAAELPPVPGATVVPFTGMQAAVSKNMVESLAVPAFRVGYPIVTDKLDELYEKVKSKGVTMTVLLAKAAAMALAQHPVVNASCRDGKSFTYNTNINIAVAVAIDGGLITPVLEDADKLDIYLLSQKWKELVKKARAKQLQPNEYSSGTFTLSNLGMFGVDRFDAILPPGQGGIMAVGASKPTVVADKDGFFSVKSKMLVNVTADHRIVYGADLAAFLQTFAKIIEDPESLTL

SEQ ID NO: 2262 - protein, 471 aa, Panicum virgatum
MATAPAPLSLSASTVPARLRAAAVPAGARGRQPRRGRMVVRAKIREIFMPALSSTMTEGKIVSWSAAEGDRVNKGDAVVVVESDKADMDVETFHDGIVAAVLVQAGESAPVGAPIALLAESEEEVPLALAKAKELSNGQPQQAALAPAEDDAATPPPPPTPAAAPAPVAAGTKGIASPHAKKLAKQHRVDLAKVTGTGPYGRITPEDVEAAAGIQPKPKPAAVAAASAPVAAPSAAAVPQAAVLPPVPGATVVPFTTMQAAVSKNMVESLAVPTFRVGYPIVTDKLDELYEKVKPKGVTMTVLLAKAAAMALAQHPVVNASCRDGKSFTYNSNINIAVAVAIDGGLITPVLQDADKLDIYLLSQNWKDLVKKARAKQLQPNEYSSGTFTLSNLGMFGVDRFDAILPPGQGAIMAVGASKPTVVADKDGFFSVKSKMLVNVTADHRTVYGADLAAFLQTFAKIIEDPESLTL

SEQ ID NO: 2263 - protein, 475 aa, Sorghum bicolor
MATAPAPLSLSASTLPARLRAGAVPAGARWRQQPRRGRMVVRAKIREIFMPALSSTMTEGKIVSWSAGEGDRVSKGDAVVVVESDKADMDVETFHDGIVAAVLVQAGESAPVGAPIALLAESEEEVPLAVAKAQELSNGNGQPQQAPPAPTEDAAAAPPPPPPAPAAAPAPVAAGTKGIASPHAKKLAKQHRVDLAKVTGTGPYGRITPADIEAAAGIQPKPKPAPAAAAPPPVAAPSVGAVPQAAVLPPVPGATIVPFTTMQAAVSKNMVESLAVPAFRVGYPIVTDKLDALYEKVKPKGVTMTVLLAKATAMALVQHPVVNASCRDGKSFTYNSNINIAVAVAIDGGLITPVLQDADKLDIYLLSQNWKDLVKKARAKQLQPNEYSSGTFTLSNLGMFGVDRFDAILPPGQGAIMAVGASKPTVVADKDGFFSVKSKMLVNVTADHRIVYGADLAAFLQTFAKIIEDPESLTL

SEQ ID NO: 2264 - protein, 473 aa, Setaria italica
MATAPAPFSLSTSTLPARLRAAAVPAGARGRQPRRGRMVVRAKIREIFMPALSSTMTEGKIVSWSAAEGDRVTKGDAVVVVESDKADMDVETFHDGIVAAVLVPAGESAPVGAPIALLAESEEEVPLALAKAKELSNGQSQQAAPAPAEEAAATPPPPPPPTPAAAPAPVAAGTKGIASPQAKKLAKQHRVDLAKVTGTGPYGRITPGDVEAAAGIQPKPKPAAVAAASPPVAAPSAAAVPQAAVLPPVPGATVVPFTTMQAAVSKNMVESLAVPAFRVGYPIVTDKLDELYEKVKPKGVTMTVLLAKAAAMALAQHPAVNASCRDGKSFTYNSNINIAVAVAIDGGLITPVLQDADKLDIYLLSQNWKDLVKKARAKQLQPNEYSSGTFTLSNLGMFGVDRFDAILPPGQGAIMAVGASKPTVVADKDGFFSVKSKMLVNVTADHRIVYGADLAAFLQTFAKIIEDPESLTL

SEQ ID NO: 2265 - protein, 469 aa, Panicum virgatum
MATAPAPLSLSASTVPARLRSAAVPVPRPRRGRMVVRSKIREIFMPALSSTMTEGKIVSWSAAEGDRVSKGDAVVVVESDKADMDVETFHDGIVAAVLVQAGESAPVGAPIALLAESEEEVPLALAKALELSNGQPQQAAPAPAEDDAATPPPPPTPAAAAPAPVAAAGTKGIASPHAKKLAKQHRVDLAKVTGTGPYGRITPEDVEAAAGIQPKPKPAAVAAASAPVAAPSAAAVPQAAVLPPVPGATVVPFTTMQAAVSKNMVESLAVPTFRVGYPIVTDKLDELYEKVKPKGVTMTVLLAKAVAMALAQHPVVNASCRDGKSFTYNSNINIAVAVAIDGGLITPVLQDADKLDIYLLSQNWKDLVKKARAKQLQPNEYSSGTFTLSNLGMFGVDRFDAILPPGQGAIMAVGASKPTVVADKDGFFSVKSKMLVNVTADHRTVYGADLAAFLQTFAKIIEDPESLTL

SEQ ID NO: 2266 - protein, 410 aa, Avena sativa
VSWTAAEGDRVNKGDAVVVVESDKADMDVETFYDGIVAVVLVPAGESAPVGAPIALLAESDEDVALALAQAQALSSGQPQQASPPSDAAALPSPPPPAEAPVADPAPVSAGTKGIATPQAKKLAKQHRVDLAKVTGTGQFGRITPADVEATAGIQPKPKVAPTPAAAPLAAPSVKAVPQAAVLPPVPGATVVPFTAMQAAVSKNMVESLSVPTFRVGYPILTDKLDELYEKVKPKGVTMTVLLAKAAAMALAQYPVVYASCGDGSSFTYNSSINIAVAVAIDGGLITPVLEQADKLDIYLLSQKWKELVKKARAKQLQPNEYNSGTFTLSNLGMFGVDRFDAILPPGQGAIMAVGASKPTVVADKDGFFSVKNKMLVNVTADHRIVYGADLAAFLQTFAKIIEDPGSLTL

SEQ ID NO: 2267 - protein, 267 aa, Leymus cinereus x Leymus triticoides
MAQLPPKIPMATGAHHWPGAGAGVDGHHGHGAAPVWADEFAEFAAARRGPHRRSLSDSVAFVEMAPGGCGAGDFDRLDDDQLMSMFPDEGGSTAPGSENGTSDSDGDKHGAAGKDRYDDANPEEPGPGQATPASSTETIRDPKRVKRILANRQSAQRSRVRKLQYISELERCVTTLQNEVSVLSPRVAFLDQQRTILTVGNSHLKQRIAALAQDKLFKDAHQEALKEEIERLRQVYQQQNLRMSSGAGAASDHGGPPPVRAEKELMS

SEQ ID NO: 2268 - protein, 355 aa, Arabidopsis lyrata
MKPETKKTEQKQKQSSQIKEDLPPVTIPPLPLPYKSCSLKVSIHCEGCKKKVKKILTSIEGVYKVDIDVKQHKVTVIGIVSPEILLKKLHKAGKNAELLPEIPDPVENKQKTVDPKEKNKKKKNEENVQRTEEATSAGTDKPEKTEVGKSDKPESEKTDAGECCSGDGCEVAPVKEKKDVLKEKDSVKEESPSPPADSAAPVAEKKAEETGGGGNGKVGKKKKKKGQNLNTTNNPTDGPARTQSLPLPTTTDYDRPFNQINDHHIITNNNPPRHDMYPYPAAGYYAPQVMYGVSYNVAQPPVSVDAASYYTPPPPYSYAYMHNGYQPSDQNPYQPRPSDSFELFSDENPNGCSVI

SEQ ID NO: 2269 - protein, 492 aa, Aegilops tauschii
MDQPPNGFAAGGLFVQHIDGQKASPPSVIVIGGGISGIASARALSNASFKVTLLESRERLGGRVHTDYSFGCPIDMGASWLHGVCNENSLAPLIRLLGLRLYRTSGDNSVLYDHDLESYALFDKDGRQIPQEIVTKVGEIFEQILKETVKVRDEYANDMPLVQAISMVLDRNPHLKLEGLQYEVLQWCICRLEAWFATDVDNISLKNWDQEHVLTGGHGLMVNGYDPVIKALSRDLDVHLNHRVTKIIQRYNKVIVCVEDGTSFVADAAIITVPLGVLKANIIKFEPELPDWKLSAISDLGVGLENKIALRFNTIFWPNVEVLGRVAQTSNACGYFLNLHKATGHPVLVCMVAGRFAYEMEKLSDEESVNFVMSQLRRMLPGATEPVQYLVSRWGTDPNSLGSYSCDLVGKPADLYERFCARVGNLFFAGEAACIDHSGSVHGAYSSGIDAAEDCRRRLSTQLGISDLFQVGKIVMREEMTEVMVPLQISRL

SEQ ID NO: 2270 - protein, 492 aa, Secale cereale
MDPPPNGFAAGGLFVQHIDRQNASPPSVIVIGGGISGIASARALSNASFKVTLLESRERLGGRVHTDYSFGCPIDMGASWLHGVCNENSLAPLIRLLGLRLYRTSGDNSVLYDHDLESYALFDKDGRQIPQEIVTKVGEIFEQILKETVKVRDEYANDMPLVQAISMVLDRNPHLKLEGLQYEVLQWCICRLEAWFATDVDNISLKNWDQEHVLTGGHGLMVNGYDPVIKALSRDLDVHLNHRVTKIIQRYNKVIVCVEDGTSFVADAAIITVPLGVLKANIIKFEPELPDWKLSAISDLGVGLENKIALRFNTVFWPNVEVLGRVAQTSNACGYFLNLHKATGHPVLVCMVAGRFAYEMEKLSDEESVNFVMSQLRRMLPGATEPVQYLVSRWGTDPNSLGSYSCDLVGKPADLYERFCAPVGNLFFAGEAACIDHSGSVHGAYSSGIDAAEDCRRRLSTQLGISDLFQVGKIVMREEMTEVMVPLQISRL

SEQ ID NO: 2271 - protein, 489 aa, Triticum aestivum
PPNGFAAGGLFVQHIDGQNASPPSVIVIGGGISGIASARALSNASFKVTLLESRERLGGRVHTDYSFGCPIDMGASWLHGVCNENSLAPLIRLLGLRLYRTSGDNSVLYDHDLESYTLFDKDGRQIPQEIVTKVGEIFEQILKETVKVRDEYANDMPLVQAISMVLDRNPHLKLEGLQYEVLQWCICRLEAWFATDVDNISLKNWDQEHVLTGGHGLMVNGYDPVIKALSRDLDVHLNHRVTKIIQRYNKVIVCVEDGTSFVADAAIITVPLGVLKANIIKFEPELPDWKLSAISDLGVGLENKIALRFNTVFWPNVEVLGRVAQTSNACGYFLNLHKATGHPVLVCMVAGRFAYEMEKLSDEESVNFVMSQLRRMLPGATEPVQYLVSRWGTDPNSLGSYSCDLVGKPADLYERFCAPVGNLFFAGEAACIDHSGSVHGAYSSGIDAAEDCRRRLSTQLGISDLFQVGKIVMREEMAEVMVPLQISRL

SEQ ID NO: 2272 - protein, 479 aa, Triticum aestivum
FVQHIDGQNASPPSVIVIGGGISGIASARALSNASFKVTLLESRERLGGRVHTDYSFGCPIDMGASWLHGVCNENSLAPLIRLLGLRLYRTSGDNSVLYDHDLESYALFDKDGRQIPQEIVTKVGEIFEQILKETVKVRDEYANDMPLVQAISMVLDRNPHLKLEGLQYEVLQWCICRLEAWFATDVDNISLKNWDQEHVLTGGHGLMVNGYDPVIKALSRDLDVHLNHRVTKIIQRYNKVIVCVEDGTSFVADAAIITVPLGVLKANIIKFEPELPDWKLSAISDLGVGLENKIALRFNTIFWPNVEVLGRVAQTSNACGYFLNLHKATGHPVLVCMVAGRFAYEMEKLSDEESVNFVMSQLRRMLPGATEPVQYLVSRWGTDPNSLGSYSCDLVGKPADLYERFCAPVGNLFFAGEAACIDHSGSVHGAYSSGIGAAEDCRRRLSTQLGISDLFQVGKIVMREEMTEVMVPLQISRL

SEQ ID NO: 2273 - protein, 492 aa, Avena sativa
MDQPPNGFAAGGLFVQHIDGKNASPPSVIVIRGGISGIASARALSNASFKVTLLESRDRLGGRVHTDYSFGCPIDMGASWLHGVCNENSLAPLIRLLGLRLYRTSGDNSVLYDHDLESYSLFDKDGRQVPQEIVTKVGEIFEEILKETVKVRDENANDMPLVQAISIVLDRNPHLKLEGLQYEVLQWCICRLEAWFATDVDNISLKNWDQEHVLTGGHGLMVNGYDPVIKALSRDLDIHLNHRVTKIIQRYNKVIVCVEDGTSFVADAAIITVPLGVLKANIIKFEPELPDWKLSAIADLGVGLENKIALQFNTIFWPNVEVLGRVAKTSNACGYFLNLHKATGHPVLVCMVAGRFAYEMEKLSDEESVNFVMSQLRKMLPGATEPVQYLVSRWGTDPNSLGSYSCDLVGKPADLYERFCAPVGNMFFAGEAACIDHSGSVHGAYSSGIDAAEDCRRRLSMQLGISNLFQVGKIAMREEMSEVMVPLQISRL

SEQ ID NO: 2274 - protein, 492 aa, Avena sativa
MDQPPNGFAAGGLFVQHIDGKNTSAPSVIVIGGGISGIASARALSNASFKVTLLESRDRLGGRVHTDYSFGCPIDMGASWLHGVCNENSLAPLIRLLGLRLYRTSGDNSVLYDHDLESYALFDKYGRQVPQEIVTKVGEIFEEILKETVKVRDENANDMPLVQAISIVLDRNPHLKLEGLQYEVLQWCICRLEAWFATDVDNISLKNWDQEHVLTGGHGLVVNGYDPVIKALSRDLDIHLNHRVTKIIQRYNKVIVCVEDGTSFVADAAIITVPLGVLKANIIKFEPELPDWKLSAIADLGVGLENKIALRFNTIFWPNVEVLGRVAQTSNACGYFLNLHKATGHPVLVCMVAGRFAYEMEKLSDEESVNFIMSQLRKMLPGATEPVQYLVSRWGTDPNSLGSYSCDLVGKPADLYERFCAPVGNMFFAGEAACIDHSGSVHGAYSSGIDAAEDCRRRLSMQLGISNLFQVGKIAMREEMSEVMVPLQISRL

SEQ ID NO: 2275 - protein, 492 aa, Brachypodium distachyon
MDQPPNGFAAGGLFVQHIDGKNASAPSVIVIGGGISGIASARALSNASFKVTLLESRDRLGGRVHTDYSFGCPIDLGASWLHGVCNENSLAPLIRLLGLRLYRTSGDNSVLYDHDLESYALFDKDGRQVPQEIVTKVGETFEQILKETVKVRDEYTNDMPLVQAISIVLDRNPHLKLEGLQYEVLQWCICRLEAWFATDVDNISLKNWDQEHVLTGGHGLMVNGYDPVIKALARDLDIHLNHRVTKIIQRYNKVIVCVEDGTSFVADAAIITVPLGVLKANIIKFEPELPDWKLSAISDLGVGLENKIALRFDTIFWPNVEVIGRVAQTSNSCGYFLNLHKATGHPVLVCMVAGRLAYEMEKLSDEESVEFVMSQLKRMLPGATEPVQYLVSRWGTDPNSLGSYSCDLVGKPADLYERFCAPVGNLFFAGEAACIDHSGSVHGAYSSGIGAAEDCRRRLSTQLGISDLFQVGKIVMREEMADAMVPLQISRL

SEQ ID NO: 2276 - protein, 502 aa, Secale cereale
GFAAGGLFVQHIDRQNASPPSVIVIGGGISGIASARALSNASFKVTLLESRERLGGRVHTDYSFGCPIDMGASWLHGVCNENSLAPLIRLLGLRLYRTSGDNSVLYDHDLESYALFDKDGRQIPQEIVTKVGEIFEQILKETVKVRDEYANDMPLVQAISMVLDRNPHLKLEGLQYEVLQWCICRLEAWFATDVDNISLKNWDQEHVLTGGHGLMVNGYDPVIKALSRDLDVHLNHRVTKIIQRYNKVIVCVEDGTSFVADAAIITVPLGVLKANIIKFEPELPDWKLSAISDLGVGLENKIALRFNTVFWPNVEVLGRVAQTSNACGYFLNLHKATGHPVLVCMVAGRFAYEMEKLSDEESVNFVMSQLRRMLPGATEPVQYLVSRWGTDPNSLGSYSCDLVGKPADLYERFCAPVGNLFFAGEAACIDHSGSVHGAYSSGIDAAEDCRRRLSTQLGISDLFQVGKIVMREEMTEVMVPLRYPGCERKEEQTCLLFNTVFC

SEQ ID NO: 2277 - protein, 492 aa, Oryza sativa
MDQPSNGFAAGGLFLRHIDGQNASPPSVIVIGGGISGIAAARALSNASFKVTLLESRDRLGGRVHTDYSFGCPIDMGASWLHGVCNENSLAPLIRLLGLRLYRTSGDNSVLYDHDLESYALFDKDGRQVPQEIVTKVGETFEKILKETVKVRAEHEDDMPLIQAISIVLDRNPHLKLDGLQYEVLQWCICRLEAWFATDVDNISLKNWDQEHVLTGGHGLMVHGYDPVIKALAQDLDIHLNHRVTKIIQRYNKTIVCVEDGTSFVADAAIITVPLGVLKANIIKFEPELPDWKLSSISDLGIGIENKIALRFNSVFWPNVEVLGRVAPTSNACGYFLNLHKATGHPVLVCMVAGRFAYEFEKLSDEESVNFVMSQLKKMLPGATEPVQYLVSRWGTDPNSLGSYSCDLVGKPADLYERFCAPVGNLFFAGEAACIDHSGSVHGAYSSGIVAAEDCRRHLSTQLGISDLFQVGKIIMREEMTEVMVPFQISRL

SEQ ID NO: 2278 - protein, 491 aa, Setaria italica
MDQPPNGFAAGGFFKHIDGQNSSPPSVIVIGGGISGIAAARALSNASFKVTLLESRDRLGGRVHTDYSFGCPIDMGASWLHGVCNENSLAPLIRMLGLRLYRTSGDNSVLYDHDLESYALFDKNGQQVPQEIVMKVGEIFEKILKETVKVRDEHANDMALIQAMAIVLDRNPHLKLEGLEYEVLQWCICRLEAWFATDTDNISLKNWDQEHVLTGGHGLMVNGYDPVIKALARDLDVHLNHRVTKIIQRYNKVIVCVEDGASFVADAAIITVPLGVLKANIIKFEPELPREKLSAIADLGVGIENKIALKFNTVFWPNVEVLGRVAPTSNACGYFLNLHKATGNPVLVCMVAGSFAYEIEKLSDEESVNFVMSQLRKMLPQATEPVQYLVSRWGSDPNSLGSYSCDLVGKPADLYERFCAPVGNLFFAGEAACIDHSGSVHGAYSSGIAAAEDCRRRLSTQLGISDLFQVGKIVVREEMNEVMVPFQISRL

SEQ ID NO: 2279 - protein, 454 aa, Triticum aestivum
ASARALSNASFKVTLLESRERLGGRVHTDYSFGCPIDMGASWLHGVCNENSLAPLIRLLGLRLYRTSGDNSVLYDHDLESYALFDKDGRQIPQEIVTKVGEIFEQILKETVKVRDEYANDMPLVQAISMVLDRNPHLKLEGLQYEVLQWCICRLEAWFATDVDNISLKNWDQEHVLTGGHGLMVNGYDPVIKALSRDLDVHLNHRVTKIIQRYNKVIVCVEDGTSFVADAAIITVPLGVLKANIIKFEPELPDWKLSAISDLGVGLENKIALRFNTIFWPNVEVLGRVAQTSNACGYFLNLHKATGHPVLVCMVAGRFAYEMEKLSDEESVNFVMSQLRRMLPGATEPVQYLVSRWGTDPNSLGSYSCDLVGKPADLYERFCARVGNLFFAGEAACIDHSGSVHGAYSSGIDAAEDCRRRLSTQLGISDLFQVGKIVMREEMTEVMVPLQISRL

SEQ ID NO: 2280 - protein, 491 aa, Panicum virgatum
MDQPPNGFAAGGFFKHIDGQNSSPPSVIVIGGGISGIAAARALSNASFKVTLLESRDRLGGRVHTDYSFGCPIDMGASWLHGVCNENSLAPLIRMLGLRLYRTSGDNSVLYDHDLESYALFDKNGQQVPQEIVTKVGETFEKILKETVKVRDEHANDMALIQAMAIVFDRNPHLKLEGLEYEVLQWCICRLEAWFATDTDNISLKNWDQEHVLTGGHGLMVNGYDPVIKALARDLDIHLNHRVTKIIQRYNKVIVCVEDGASFVADAAIITVPLGVLKANIIKFEPELPNEKLSAIADLGVGIENKIALKFNTVFWPNVEVLGRVAPTSNACGYFLNLHKATGNPVLVCMVAGRFAYKIEKLSDEESVNFVMSQLRKMLPEATEPVQYLVSRWGSDPNSLGSYSCDLVGKPSDLYERFCAPVANLFFAGEAACIDHSGSVHGAYSSGIVAAEDCRRRLSTQLGISDLFQVGKIVMREEMTEVMVPFQISRL

SEQ ID NO: 2281 - protein, 491 aa, Saccharum officinarum
MDQPPNGFAAGGFFTHIDGQNRSPPSVIVIGGGISGIAAARALSNASFKVTLLESRDRLGGRVHTDYSFGCPIDMGASWLHGVCNENSLAPLIRMLGLRLYRTSGDNSVLYDHDLESYALFDKHGQQVPQEIVSKVGETFEKILKETVKVRDEHANDMPLIQAMAIVLDRNPHMKLEGLEYEVLQWCICRLEAWFATDMDNISLKNWDQEHVLTGGHGLMVNGYDPVIKALAQGLDIHLNHRVTKIIQRYNKVIVCVEDGASFVADAAIITVPLGVLKANIIKFEPELPREKLSAIADLGVGIENKIALKFNTVFWPNVEVLGRIAPTSNACGYFLNLHKATGNPVLVCMVAGRFAYEIEKLSDEESVNFVMSQLRKMLPQATEPVQYLVSRWGSDPNSLGSYSCDLVGKPADLYERFCAPVGNLFFAGEAACIDHSGSVHGAYSSGIAAAEDCRRRLSTQLGISDLFQVGKIIVREEMTEVMVPFQISRL

SEQ ID NO: 2282 - protein, 491 aa, Echinochloa colona
MDQPPNGFAAGGFFKHIDGQNSSPPSVIVIGGGISGIAAARALSNASFKVTLLESRDRLGGRVHTDYSFGCPIDMGASWLHGVCNENSLAPLIRMLGLRLYRTSGDNSVLYDHDLESYALFDKNGQQVPQEIVTKVGETFEKILKETVKVRDEHANDMALIQAMAIVLDRNPHLKLYGLEYEVLQWCICRLEAWFATDTDNISLKNWDQEHVLTGGHGLMVNGYDPVIKALARDLDIHLNHRVTKIIQRYNKVIVCVEDGASFVADAAIITVPLGVLKANIIKFEPELPNEKLSAIADLGIGIENKIALKFNTVFWPNVEVLGRVAPRSDACGYFLNLHKATGNPVLVCMVAGRFAYEIEKLSDEESVNFVMSQLRKMLPEATEPVQYLVSRWGSDPNSLGSYSCDLVGKPADLYERFCAPVGNLFFAGEAACIDHSGSVHGAYSSGIAAAEDCRRRLSTQLGISDLFHVGKVVMREEMAEVMVPFQISRL

SEQ ID NO: 2283 - protein, 491 aa, Sorghum bicolor
MDQPPNGFAAGGFFTHIDGQNRSPPSVIVIGGGISGIAAARALSNASFKVTLLESRDRVGGRVHTDYSFGCPIDMGASWLHGVCNENSLAPLIRMLGLRLYRTSGDNSVLYDHDLESYALFDKHGQQVPQEIVSKVGETFEKILKETVKVRDEHANDMPLIQAMAIVLNRNPHMKLEGLEYEVLQWCICRLEAWFATDMDNISLKNWDQEHVLTGGHGLMVNGYDPVIKALAQGLDIHLNHRVTKIIQRYNKVIVCVEDGASFVADAAIITVPLGVLKANIIKFEPELPREKLSAIADLGVGIENKIALKFNTVFWPNVEVLGRIAPTSNACGYFLNLHKATGNPVLVCMVAGRFAYEIEKLSDEESVNFVMSQLRKMLPQATEPVQYLVSRWGSDPNSLGSYSCDLVGKPADLYERFCAPVGNLFFAGEAACIDHSGSVHGAYSSGIAAAEDCRRRLSTQLGISDLFQVAKVVMREEMNEVMVPFQISRL

SEQ ID NO: 2284 - protein, 449 aa, Secale cereale
MDPPPNGFAAGGLFVQHIDRQNASPPSVIVIGGGISGIASAHALSNASFKVTLLESRERLGGRVHTDYSFGCPIDMGASWLHGVCNENSLAPLIRLLGLRLYRTSGDNSVLYDHDLESYALFDKDGRQIPQEIVTKVGEIFEQILKETVKVRDEYANDMPLVQAISMVLGRNPHLKLEGLQYEVLQWCICRLEAWFATDVDNISLKNWDQEHVLTGGHGLMVNGYDPVIKALSRDLDVHLNHRVTKIIQRYNKVIVCVEDGTSFVADAAIITVPLGVLKANIIKFEPELPDWKLSAISDLGVGLENKIALRFNTVFWPNVEVLGRVAQTSNACGYFLNLHKATGHPVLVCMVAGRFAYEMEKLSDEESVNFVMSQLRRMLPGATEPVQYLVSRWGTDPNSLGSYSCDLVGKPADLYERFCAPVGNLFFAGEAACIDHSGSVHGAYSSGI

SEQ ID NO: 2285 - protein, 493 aa, Zea mays
MDQPPNGFAAGGFFTHIDGQNRSPPSVIVIGGGISGIAAARALSTASFKVTLLESRDRPGGRVHTDYSFGCPIDMGASWLHGVCNENSLAPLIRMLGLRLYRTSGDNSVLYDHDLESYALFDKHGQQVPQEIVSKVGETFERILKETVIVRDEHANDMPLFQAIAIVLDRNPHMKLQGLEYEVLQWCICRLEAWFATDMDNISLKTWDQEHVLTGGHGLMVNGYDPVIRALAQGLDIHLNHRVTKIIQRYNKVIVCVEDGASFVADAAIVTVPLGVLKANIIKFEPELPKEKLSAIADLGVGIENKIALKFDTVFWPDVEVIGRVAPTSNACGYFLNLNKATGNPVLVCMVAGRFAYEIEKLSDEESVNFVMSQLRNMLPQATDPVQYLVSRWGSDPNSLGSYSCDLVGKPADLYERFCAPVGSLFFAGEAACIDHSGSVHGAYSSGIAAAEDCRRRLSAQLGISAGLFQVGKAAMREEMTAEAMVPFQISRL

SEQ ID NO: 2286 - protein, 469 aa, Pennisetum glaucum
SPPSVIVIGGGISGIAAARALSNASFKVTLLESRDRLGGRVHTDYSFGCPIDMGASWLHGVCNENSLAPLIRMLGLRLYRTSGDNSILYDHDLESYALFDKNGQQVPQEIVTKVGEIFERILKETAKVRDEHANDMALIQAMAIVLDRNPHLKLEGLEYEVLQWCICRLEAWFATDTDNISLKNWDQEHVLTGGHGLMVNGYDPVIKALARDLDIHLNHRVTKIIQRYNKVIVCVEDGASFVADAAIITVPLGVLKANIIKFEPELPREKLSAIADLGVGIENKIALKFNTVFWPNVEVLGRVAPMSNACGYFLNLHKATGNPVLVCMVAGSFAYEIEKLSDEESVNFVMSQLRKMLPLATEPVQYLVSRWGSDPNSLGSYSCDLVGKPADLYERFCAPVGNLFFAGEAACIDHSGSVHGAYSSGIAAAEDCRRRLSTQLGISDLFQVGKIVVREEMAEAMVPFQISRL

SEQ ID NO: 2287 - protein, 303 aa, Panicum virgatum
MADFSSHHSLLLKMPAALTNGHSHNLSSLLFYGQNHGQGATANANAASGTAAAMAEDASLESSSAVVDTSPQGSASPMDRKRKATEDSATLSSAHSKDCNQEGKSKRGKRSNKEAEEKSTTDDEAPKGYIHVRARRGQATDSHSLAERVRRERISERMRMLQALVPGCDKVTGKALILDEIINYVQSLQNQVEFLSMRIASMSPVLYGFGLDSDGLHDHAQKMGGMFQEALAMPGPVLSQASPAPSQAIIETTSTTPFSLQGQGAISFSQDNGSTYLMQQAVGEPTRQELLNQLVFNNMCSFQ

SEQ ID NO: 2288 - protein, 285 aa, Pennisetum glaucum
GHSPNLSSLLFYGQNNHGQGAPANANAASGTAAAMAEDASLETSSAVLDTSPQGSSSPMDRKRKATEDSATLSSAHSKDCKQEGRSKRGKKPHKEAEEKSNTDDEAPKGSIHVRARRGQATDSHSLAERVRRERISERMRMLQALVPGCDKVTGKALILDEIINYVQSLQNQVEFLSMRIASMSPVLYGFGLDSDGLHEHAQKMGGMLQEALAMPGPVLSQASPTPSQTIMDTTSSTPYSLQGHGAISFSQDNGSNYLMQQSVGEPITRQELLNQLVFNNMCSFQ

SEQ ID NO: 2289 - protein, 293 aa, Sorghum bicolor
MADFSQNDSLLLKMPSHSPNFSSLLFYGHNHGEAAAPANANAMVEDASLESSSAVVDTSPQDSASPMERKRKATEDSATLSSAQSKDCKQQESKSKRGKRPNKETEEKSTTEDEATKGYIHVRARRGQATDSHSLAERVRRERISERMRMLQALVPGCDKVTGKALILDEIINYVQSLQNQVEFLSMRIASMSPVLYGFGLDSDGLHDHAQKMGGMFQEALAMPGPVLSQASPAPSQAIMDTTSTTPYSLQGQGSISFSQENGSTYLMQQAVGEPTRQELLNQLVFNNMCSFQ

SEQ ID NO: 2290 - protein, 54 aa, Cynodon dactylon
MGHSNVWNSHPKNYGPGSRVCRVCANPHGLIYGLMCCRQCFRSNAKDIGFIKYR

SEQ ID NO: 2291 - protein, 56 aa, Pseudoroegneria spicata
MGHSNVWNSHPKNYGPGSRVCRVCGNSHGLIRKYGLMCCRQCFRSNAKDIGFIKYR

SEQ ID NO: 2292 - protein, 56 aa, Acacia harpophylla
  Sequence also found in Organisms: Cucumis melo, Cucumis sativus, Cyamopsis tetragonoloba, Glycyrrhiza uralensis, Jatropha curcas, Liriodendron tulipifera, Manihot esculenta, Prunus persica
MGHSNVWNSHPKNYGPGSRTCRVCGNPHGLIRKYGLMCCRQCFRSNAKEIGFIKYR

SEQ ID NO: 2293 - protein, 56 aa, Bruguiera gymnorhiza
  Sequence also found in Organisms: Juglans hindsii x Juglans regia, Manihot esculenta
MGHSNVWNSHPKNYGPGSRACRVCGNPHGLIRKYGLMCCRQCFRSNAKEIGFIKYR

SEQ ID NO: 2294 - protein, 56 aa, Bruguiera gymnorhiza
MGHSNVWNSHPKNYGPGSRACRVCGNSHGLIRKYGLMCCRQCFRSNAKEIGFIKYR

SEQ ID NO: 2295 - protein, 56 aa, Cyamopsis tetragonoloba
  Sequence also found in Organisms: Juglans hindsii x Juglans regia
MGHSNVWNSHPKNYGPGSRACRVCGNPHGIIRKYGLMCCRQCFRSNAKEIGFIKYR

SEQ ID NO: 2296 - protein, 56 aa, Eucalyptus grandis
MGHSNVWNSHPKSYGPGSRACRVCGNPHGLIRKYGLMCCRQCFRSNAKEIGFIKYR

SEQ ID NO: 2297 - protein, 56 aa, Actinidia deliciosa
  Sequence also found in Organisms: Camellia sinensis, Quercus alba
MGHSNVWNSHPKSYGPGSRTCRVCGNPHGLIRKYGLMCCRQCFRSNAKEIGFIKYR

SEQ ID NO: 2298 - protein, 56 aa, Liriodendron tulipifera
MGHTNVWNSHPKNYGPGSRTCRVCGNPHGLIRKYGLMCCRQCFRSNAKEIGFIKYR

SEQ ID NO: 2299 - protein, 56 aa, Prunus persica
MGHSNVWNSHPKNYGPGSRTCRVCGNPHGLIRKYALMCCRQCFRSNAKEIGFIKYR

SEQ ID NO: 2300 - protein, 56 aa, Rhizophora mangle
MGHSNVWNSHPKNYGPGSRACRVCGNPHGLIRRYGLMCCRQCFRSNAKEIGFIKYR

SEQ ID NO: 2301 - protein, 56 aa, Persea americana
MGHSNVWNSHPKNYGPGSRACRVCGNSHGLIRKYGLMCCRQCFHSNAKAIGFIKYR

SEQ ID NO: 2302 - protein, 56 aa, Quercus alba
MGHSNVWSSHPKSYGPGSRTCRVCGNPHGLIRKYGLMCCRQCFRSNAKEIGFIKYR

SEQ ID NO: 2303 - protein, 56 aa, Carica papaya
MGHSNVWNSHPKTYGPGSRACRVCGNSHGLIRKYGLMCCRQCFRSNAKEIGFIKYR

SEQ ID NO: 2304 - protein, 56 aa, Salvia sclarea
MGHSNIWNSHPKNYGPGSRTCRVCGNPHGIIRKYGLMCCRQCFRSNAKEIGFIKYR

SEQ ID NO: 2305 - protein, 56 aa, Camellia sinensis
MGHSNIWNSHPKTYGPGSRTCRVCGNPHGLIRKYGLMCCRQCFRSNAKEIGFIKYR

SEQ ID NO: 2306 - protein, 56 aa, Antirrhinum majus
MGHSNIWNMHPKNYGPGSRTCRVCGNPHGIIRKYGLMCCRQCFRSNAKEIGFIKYR

SEQ ID NO: 2307 - protein, 56 aa, Persea americana
MGHSNVWNSHPKNYGPGSRACRVCGNSQGLIRKYGLMCCRQCFHSNAKAIGFIKYR

SEQ ID NO: 2308 - protein, 56 aa, Cleome gynandra
MGHSNVWNSHPKKYGPGSRACRVCGNSHGLIRKYGLNCCRQCFRSNAKEIGFIKYR

SEQ ID NO: 2309 - protein, 56 aa, Cleome spinosa
MGHSNVWNSHPKKYGPGSRTCRVCGNSHGLIRKYGLNCCRQCFRSNAKEIGFIKYR

SEQ ID NO: 2310 - protein, 56 aa, Coffea canephora
MGHSNIWNSHPKNYGPGSRACRVCGNSHGIIRKYGLMCCRQCFRSNAKEIGFIKYR

SEQ ID NO: 2311 - protein, 56 aa, Carthamus tinctorius
  Sequence also found in Organisms: Cynara scolymus, Gerbera hybrid cultivar, Tragopogon dubius
MGHSNVWNSHPKTYGPGSRTCRVCGNSHGLIRKYGLMCCRQCFHSNAKEIGFIKYR

SEQ ID NO: 2312 - protein, 56 aa, Heritiera littoralis
  Sequence also found in Organisms: Lotus japonicus
MGHSNVWNSHPKTYGPGSRACRVCGNPHAIIRKYGLMCCRQCFRSNAKEIGFIKYR

SEQ ID NO: 2313 - protein, 56 aa, Mesembryanthemum crystallinum
MGHSNVWNSHPKSYGPGSRACRVCGNPHAIIRKYGLMCCRQCFRSNAKEIGFIKYR

SEQ ID NO: 2314 - protein, 56 aa, Jatropha curcas
MGHSNVWNSHPKNYGPGSRACRVCGNPHGLIRKYGLMCCREGFRNNAKEIGFIKYR

SEQ ID NO: 2315 - protein, 56 aa, Actinidia deliciosa
MGHSNIWNAHPKTYGPGSRTCRVCGNPHGLIRKYGLMCCRQCFRSNAKEIGFIKYR

SEQ ID NO: 2316 - protein, 56 aa, Salvia sclarea
MGHSNIWNSHPKTYGPGSRTCRVCGNPHGIIRKYGLMCCRQCFRSNAKEIGFIKYR

SEQ ID NO: 2317 - protein, 56 aa, Tamarix hispida
MGHSNVWNSHPKNYGPGSRTCRVCGNSHAIIRKYGLMCCRQCFRSNAKEIGFIKYR

SEQ ID NO: 2318 - protein, 61 aa, Secale cereale
AAAAAMGHSNVWNSHPKNYGPGSRVCRVCGNSHGLIRKYGLMCCRQCFRSNAKDIGFIKYR

SEQ ID NO: 2319 - protein, 56 aa, Antirrhinum majus
MGHANIWNMHPKNYGPGSRTCRVCGNPHGIIRKYGLMCCRQCFRSNAKEIGFIKYR

SEQ ID NO: 2320 - protein, 56 aa, Artemisia annua
  Sequence also found in Organisms: Gerbera hybrid cultivar
MGHSNIWNSHPKTYGPGSRTCRVCGNSHGLIRKYGLMCCRQCFHSNAKEIGFIKYR

SEQ ID NO: 2321 - protein, 56 aa, Artemisia annua
MGHSNIWNSHPKLYGPGSRTCRVCGNSHGLIRKYGLMCCRQCFHSNAKEIGFIKYR

SEQ ID NO: 2322 - protein, 56 aa, Taraxacum officinale
MGHSNIWNSHPKTYGPGSRLCRVCGNSHGLIRKYGLMCCRQCFHSNAKEIGFIKYR

SEQ ID NO: 2323 - protein, 56 aa, Nicotiana tabacum
  Sequence also found in Organisms: Orobanche aegyptiaca, Solanum melongena, Solanum phureja, Solanum tuberosum
MGHSNIWNAHPKNYGPGSRTCRVCGNPHAIIRKYGLMCCRQCFRSNAKEIGFIKYR

SEQ ID NO: 2324 - protein, 56 aa, Ipomoea nil
MGHSNIWNAHPKNYGPGSRACRVCGNSHGIIRKYGLMCCRQCFRSNAKEIGFIKYR

SEQ ID NO: 2325 - protein, 56 aa, Orobanche aegyptiaca
MGHSNVWNSHPKNYGPGSRACRVCGNVHAIIRKYGIMCCRQCFRSNAKEIGFIKYR

SEQ ID NO: 2326 - protein, 56 aa, Raphanus sativus
MGHDNVWNSHPKKYGPGSRTCRVCGNSHGLIRKYGLNCCRQCFRSNAKEIGFIKYR

SEQ ID NO: 2327 - protein, 56 aa, Tamarix hispida
MGHSNVWNSHPKNYGPGSRTCRVCGNSHAIIRKYGLMCCSQCFRSNAKEIGFIKYR

SEQ ID NO: 2328 - protein, 65 aa, Cenchrus ciliaris
TSSFPASAAMGHSNVWNSHPKNYGPGSRVCRVCANPHGLIRKYGLMCCRQCFRSNAKDIGFIKYR

SEQ ID NO: 2329 - protein, 56 aa, Artemisia annua
MGHGNIWNSHPKTYGPGSRTCRVCGNSHGLIRKYGLMCCRQCFHSNAKEIGFIKYR

SEQ ID NO: 2330 - protein, 56 aa, Cryptomeria japonica
MGHSAVWNSHPKTYGPGSRTCRVCGNPHGLIRKYGIMCCRQCFRSYSKEIGFIKYR

SEQ ID NO: 2331 - protein, 56 aa, Ipomoea batatas
  Sequence also found in Organisms: Ipomoea nil
MGHSNIWNAHPKTYGPGSRACRVCGNSHGIIRKYGLMCCRQCFRSNAKEIGFIKYR

SEQ ID NO: 2332 - protein, 56 aa, Nuphar advena
MGHSAVWNSHPKNYGPGSRACRVCGNSHAIIRKYGLMCCRQCFHSNAKAIGFIKYR

SEQ ID NO: 2333 - protein, 56 aa, Petunia hybrida
MGHSNIWNAHPKSYGPGSRTCRVCGNPHAIIRKYGLMCCRQCFRSNAKEIGFIKYR

SEQ ID NO: 2334 - protein, 56 aa, Raphanus sativus
MGHDNVWNSHPKKYGPGSRTCRVCGNSHGLIRKYGLNCCRHCFRSNAKEIGFIKYR

SEQ ID NO: 2335 - protein, 56 aa, Raphanus sativus
MGHDNVWNSHPKKYGPGSRPCRVCGNSHGLISKYGLNCCRQCFRSNAKEIGFIKYR

SEQ ID NO: 2336 - protein, 56 aa, Lotus japonicus
MGHSNVWNSHPKTYGPGSRACRVCGNPHAIIHKYGLMCCRQCFRSNAKEIGFIKVN

SEQ ID NO: 2337 - protein, 56 aa, Senecio madagascariensis
MGHSNIWNAHPKLYGPGSRSCRVCGNSHGIIRKYGLMCCRQCFHSNAKEIGFIKYR

SEQ ID NO: 2338 - protein, 61 aa, Chelidonium majus
LSAIKMGHSNVWNSHPKNYGPGSRACRVCGNPHAIIRKYGLMCCRQCFRSNAKEIGFIKYR

SEQ ID NO: 2339 - protein, 65 aa, Zea mays
MGHSNVWNSHPKNYGPGSRVCRVCANPHGLIRKYGLMCCRQCFRSNAKDIGFIKVCNISFKLLCE

SEQ ID NO: 2340 - protein, 62 aa, Allium cepa
GLSTETMGHANVWNSHPKNYGPGSRACRVCGNPHGLIRKYGLMCCRQCFRENAKQIGFIKYR

SEQ ID NO: 2341 - protein, 56 aa, Raphanus sativus
MGFAAIWNSHPKKYGPGSRTCRVCGNSHGLIRKYGLNCCRQCFRSNAKEIGFIKYR

SEQ ID NO: 2342 - protein, 56 aa, Zamia vazquezii
MGHSSIWNFHPKSYGLGSRSCRVCGNPHGLVRKYGLMCCRQCFRSYAKDIGFVKYR

SEQ ID NO: 2343 - protein, 65 aa, Sarracenia psittacina
GFSLREREKMGHSNVWNSHPKNYGPGSRTCRVCGNPHGLIRKYGLMCCRQCFRSNAKEIGFIKYR

SEQ ID NO: 2344 - protein, 67 aa, Avena sativa
GGGRRKANASTMGHSNVWNSHPKNYGPGSRVCRVCGNSHGLIRKYGLMCCRQCFRSNAKDIGFIKYR

SEQ ID NO: 2345 - protein, 56 aa, Cryptomeria japonica
MGHTAVWNSHPKTYGSCSRACRVCGNPHAIIRKYGLMCCRQCFRSYAKDIGFVKYR

SEQ ID NO: 2346 - protein, 56 aa, Raphanus sativus
MGFAAIWNSHPKKYGPGSRTCRVCGNSHGLIRKYGLNCCRQCSRSNAKEIGFIKYR

SEQ ID NO: 2347 - protein, 61 aa, Centaurea maculosa
RRRRRMGHSNIWNSHPKLYGPGSRTCRVCGNSHGLIRKYGLMCCRQCFHSNAKEIGFIKYR

SEQ ID NO: 2348 - protein, 66 aa, Avena sativa
ERKLSEEEKTMGHENVWNSHPKNYGPGSRVCRVCGNSHGLIRKYGLMCCRQCFRSNAKDIGFIKYR

SEQ ID NO: 2349 - protein, 667 aa, Sorghum bicolor
MPTPSPPPLRVAALLLCYLCLSLLPLLASSEPDADKAALLAFLSSVGRGATPRARINWPTTPLACFSSASGAPGWTGVTCSADGARVVALHLPGLGLSGAVPQGTLGNLTALQLLSLRSNNLSGPFPADLLRLPALTGLHLHRNAFSGALPPGLAGLAGLQVLDLSFNGFDGGIPPDLANLTNLVALNLSNNSLSGRVPDLGLPALKFVNLSNNHLDGPLPASLLRFADASFAGNNLTRPLAPAPPVVLPPPSSGLAPPSAATSARRRVRLSEAAILAIAVGGCVVVFALAAVILIAFCNREGRDDETGSDGGVVVGKGGGDKKGRESPESKAVIGKAGDGNRMVFFEGPSLAFDLEDLLRASAEVLGKGAFGTAYRAVLEDATTVVVKRLKEVNAGRRDFEQQMELVGRIRHDNVVELRAYYYSKDEKLLVYDYYSRGSVSNMLHGKRGEDRMPLDWETRLKIAVGAARGVAHIHTENNGRFVHGNIKASNVFINKHEYGCISDLGLALLMNPITARSRSLGYCAPEVADTRKASQSSDVYSFGVFILELLTGKSPVQITGGGNEVVHLVRWVQSVVREEWTAEVFDGELLRYPNIEEEMVEMLQIAMACVSRTPERRPKMADVVRTIEEVRRSDTGTRPSTEASTPAAIEAAQNWAESSSAAQER

SEQ ID NO: 2350 - protein, 672 aa, Zea mays
MPTPPLRGAGLLLRICLFLCLSLRPRLASSEPDADKAALLAFLSGVGRGATARARINWSTTHLACSADGPGPGWTGVTCSADGARVVALHLPGLGLSGAVPPGTLGRLTALQLLSLRSNDLSGPLPADLLRLPALEGLHLHRNAFSGALPAALAGLTALQVLDLSFNAFDGAVPGALANLTRLVALDLSNNSLSGRVPDLGLPALRFLNLSNNRLDGTVPASLLRFPDAAFAGNSLTRPAPAQAPPVVVAPPPGLAAPPPARRRPRLSEAAILAIAVGGCVLGFAVAALLLLAFCNSSREGRDEETVGGGAAAGKGGEKKGRESPESKAVIGKAGDGNRMVFFEAPSLAFDLEDLLRASAEVLGKGAFGTAYRAVLEDATTVVVKRLKEVNAGRRDFEQQMELLGRIRHDNVVELRAYYYSKDEKLLVYDYYSRGSVSNMLHGKRGEDRTPLDWETRLKIALGAARGVAHIHTENNGRFVHGNIKASNVFINKHEHGCVSDHGLASLMNPVTARSRSLGYCAPEVADTRKASQSSDVYSFGVFVLELLTGKSPVQITGGNGGDVVHLVRWVQSVVREEWTAEVFDGELLRYPNIEEEMVEMLQVAMACVSRSPERRPRMADVVRTIEEVRRSGSGTATGTGTRPSTEASTPATAAEAAQSRAEEGGSSAVAQ

SEQ ID NO: 2351 - protein, 1025 aa, Sorghum bicolor
MSSRLKDRGGGGSRATAAATRPLTPKPFSISSSARRTTAAAAAAGKENTASKPAKPTSAVRWSTSSLPRASRIQSSVDSSKLVSTLRAPVLPGRPSIGKDSVVEAGLRRSISGGIRASSVEKGRRSISVVGSRASEARRGSAGAGGDGTGRRERFDAKAKGSDEISTRRDDLDAKGKQADEIGRKRESFDAKAKQIGGKRESFGVNVSKQCDEIKGKADSFVSNTKKQCEDVGGRREGSDSKAKPGEEINMKKEGPNKLVKEMHFKKADPGEASSKSVECCDTQKYDEIGNTSVIPVFTVHVVDSNNVPDPIRKQQKNNEEGRKQEEKGKLADRIRVFEKVAAGGEGGSAKPTSAMNRYPSKLHEKLAALEGRVQKIATDIKKTKEMLDENNPDEPKQILSNIQKEITAIEKAISHVKDDNKIQLGTADSSECEISHPEISEKCNIAKPGDTKQAGKGLNADELEARFFPHHKLLRGRISSTSTQQESSVDMKKDCNGKTRPAASNPDDDENSIAMEFLASLDGEENDFFKDRRAKKLEKNKICEVADATSKTSSQGSSKNPVGLNHKEEIELLATEELEEFDDQENKSSMMLQEETEESCNSQLSGIGNKSSTGGWFVSEGEAVLLAHGDGTCSYYDIANHEFKSEYKPPSMVSNNMWGDCWLIRAPGVDGCSGRYVVAASAGNALEPGFCSWDYYTREVKSFHVEEEASQAFAPTSRAILGALSNVGSSRSSSALSNSERQQWWYKPCGPLLLSTASKQKMVTAYDIRDGDVVMKWEVSNPVMGMEYSSPLQWRSRGKVVIAGSESIGLWDVNSLNPQPLLSVASGKKVYCLHVNNTDAEVGGGVRQRVSSSEVEGNDGVFSTQESVNVFDFRVPAGIGLKIARHGGIANSIFSRGDSVFIGSTEGRLQIKGGLRSRVQQYSLRKGKLVATYELPEFNAHIHHSAITQVWGDSNLVLAACGMGLFAFDTFKEDMQPTYSFDRGNTIGVREAIGPDDLYCPTFDYSSSRVLLVSRDRPAHWRYL

SEQ ID NO: 2352 - protein, 1025 aa, Setaria italica
MSSRLKDRGGGGAKAAASRPLTPKPFSISSSARRTTAAAAGKENSASKPAKPTSAVRWSTSSLPRASRIQSSVESSKLVSTLRAPVLPGRASIGKDPVPDAGLRRSVSGGIRSSSVEKGRRSVSAVGSRASEARRGSGGVGSDEISRRREGVDAKSKGLDGISRRRDDLDAKAKQTGEIDRKRDSFDAKAKQVSGKRDGFGAHVVKQRDEIKGKTEICGANMKRQSEEIGGRREGSDSKAKAGEEISGRKEGLNIKLVKEIPGENADSGEASSNAADFSATQKDDEEGNGSVIPVFTVHVVDPIDVPGAAREQQKNNEECKKQEEKSKLADKIRVFEKAAAGGEGRSAKPVSAVNKYPSKLHEKLAALEGRVQKIATDIKKTKEMLDENNPDEPKQILSNIQKEINAIEKAISHVKDDNKIQLGTADSSECESSHAESAAKCTVAKPGGLKHAGKGLNTDELEARFFPHHKLLRDRKSSTSTHHDSSADTKRVIPGTTGPAAPDPDDDENCIAMEFLASLDGEENDFFKDRRAKKLEKNKIYEVADATSKTSSQGSSKNPVGPNHKEEIELLAKEKLEEFDEQENKPSMMVQEETEESCSDQLSGIGNKSSTGGWFVSEGEAVLLAHGDGTCSYYDIANHEFKSEYKPPSMVSNNTWGDCWLIRAPGVDGCSGRYVVAASAGNALEPGFCSWDYYTREVKAFHIEEEASHDPAPPPRAVLGPLSNLGSSRSSSALSNGETQQWWYKPCGPLLLSTASKQRMVTAYDIRDGDVVMKWEVSSPVMGMEYSSPLQWRSRGKVVIAGIESIGLWDVNSLNPQPLLSVASSGKKVYCLHVNNTDAEVGGGVRQRVSSSEVEGNDGVFSTHESVNVFDFRVPAGIGLKIARHGGTANSIFSRGDSVFIGSTEGRLQIKGGLRSRVQQYSLRKGKLVATYELPEFNAHFHHSAITQVWGNSNLVLAACGMGLFAFDTFKEDIQPTYSFDRGNTIGVREAIGPDDLYCPTFDYSSSRVLLVSRDRPAQWRYLS

SEQ ID NO: 2353 - protein, 1029 aa, Panicum virgatum
MSSRLKDRGGGGGKASATATASRPLTPKPFSISSSARRTTAAAAGKENSASKPVKPTSAVRWSTSSLPRASRIQSSVESSKLVSTLRASVLPGRASIGKDPVADAGLRRSVSGGIRSSSVEKGRRSVSVVGSRASEARRGSGGVGSDDIGKRREGFDAKGKGLDGIGRKRDDLDAKVKQTGEIDRKRESFDAKAKQIGGKRDSFCVNVSKQCDEIKAKTEITGVNMKKQSEEIVGRREDFDTKAKAGEEITRKKEGLNMKLVKEMHAKKSNSGEASSNAADFCPAQKDDEEGNGSVIPVFTVRVVDSIDVPGTMREQQKNNEECMKQEEKGKLADKIRVFERAAAGGEERSVKPVFGVNKYPSKLHEKLAALEGRVQKIATDIKKTKEMLDENNPDEPKQILSNIQKEITAIEKAISHVKDDNKIQLGTAGSSECESSHAESAAKCTVVKPSDLKHAGKGLNTDELEARFFPHHKLLRDRKSSTSAHQESSADAKKVCPGKTGPSAPATDVDENSITMEFLASLDGEENDFFKDRRAKKMEKNMICEVADATSKTSSQGSSKNPVGPNHKEEIELLASEKLEEFDEQENKPSMMVQEETEESSNDQLSGIGNKSSTGGWFVSEGEAVLLAHGDGTCSYYDIANHEFKSEYKPPSMVSNNMWGDCWLIRAPGVDGCSGRYVVAASAGNALEPGFCSWDYYTREVKAFHIDEEASHALAPPPRAVLGPLSNLGSSRSSSALSNGETQQWWYKPCGPLLLSTASKQKIVTAYDIRDGDVVMKWEVSNPVMGMEYSSPLQWRSRGKVVIAGSESIGLWDVNSLNPQPLLSVASSNKKVYCLHVNNTDAEVGGGVRQRVSSSEVEGNDGVFSTQESVNVFDFRVPAGIGLKIARHGGTANSIFSRGDSVFIGSTEGRLQIKGGLRSRVQQYSLRKGKLVATYELPEFNAHFHHSAITQVWGNSNLVLAACGMGLFAFDTYKEDMQPTYSFDRGNTIGVRETIGPDDLYCPTFDYSSSRVLLVSRDRPAHWRYMS

SEQ ID NO: 2354 - protein, 1027 aa, Panicum virgatum
MSSRLKDRGGGGKASATAAASRPLTPKPFSISSSARRTTAAAAGKENSASKPIKPTSAVRWSTSSLPRASRIQSSVESSKLVSTLRASVLPGRASIGKDPVADAGLRRSVSGGIRSSSVEKGRRSVSVVGSRASEARRGSGGVGSDDIRRRPEGFDAKAKRLDGIGRKRDDLDAKAKQTGKIDRKRESFDAKTKQIGGKRDSFGVNMSKQCDEIKGKTEITGANMQKQSEEIVGRREDFDMKAKAGEEISRKKEGLNMKLVKEMHAKKADSGEASSNAAELCPAQKDDEEGNGSVIPVFTVRVVDSIDVRGTTREQQKNSEGCKKQEEKGKLADTIRVFERAAAGGEGRSVKPVSGVNKYPSKLHEKLAALEGRVQKIATDIKKTKEMLDENNPDEPKQILSNIQKEIISIEKAISHVKDDNKIQLGTADSSECESSHAESAAKCTVVKPSGLKHAGKGLNTDELEARFFPHHKLLRDRKSSTSTHQESSADTKVCPGKTGLAAPAPDVDENSITMEFLASLDGEENDFFKDRRAKKMEKIMICEVADATSKTSSQGSSKNPVGPNHKEEIELLASEKLEEFDEQENKPSMMVQEETEESSNDQLSGIGNKSSTGGWFVSQGEAVLLAHGDGTCSYYDIANHEFKSEYKPPSMVSNNMWGDCWLIRAPGVDGCSGRYVVAASAGSALEPGFCSWDYYTREVKAFHIDEEASHALAPPPRAVLGPLSNLGSSRSSSALSNGETQQWWYKPCGPLLLSTASKQKMVTAYDIRDGDVVMKWEVSNPVMGMEYSSPLQWRSRGKVVIAGSESIGLWDVNSLNPQPLLSVASSNKKVYCLHVNNTDAEVGSGVRQRVSSSEVEGNDGVFSTQESVNVFDFRVPAGIGLKIARHGGTANSIFSRGDSVFIGSSEGRLQIKGGLRSRIQQYSLRKGKLVATYELPEFNAHFHHSAITQVWGNSNLVLAACGMGLFAFDAYKEDMQPTYSFDRGNTIGVRETIGPDDLYCPTFDYSSSRVLLVSRDRPAYWRYMS

SEQ ID NO: 2355 - protein, 983 aa, Zea mays
MSSRLKDTGGGGGRATAAATRPLTPKPFSVSSSARRTTAVAAAGKENTASKPSKPTSAVRWSTSSLPRASRIQSSVESSKLVSTLRAPVLPGRPSVGKDNVVEAGLRRSVNGGIRASSVEKGRRSVSVVGSRASEARRGSAGAGGDGTSRRERLDAKAKGLDEISRRRDDLDAKGKQTDEIGRKRESFDAKPKQIGGKRQGFGVNVSKQCDEIKGKTDAFVSNMKKQSEDVGGRRVGSDSKAKAGEEINMRKEGLNKLVKEMHTQKADPGEVSSKSVECCATQKDDEIGNTSVIPVFTVHVVDSMDAPDPIRKQQKNNEEGRKPEEKGKLADRIRVFEKVAAGGEGASAKPVSAVNRYPSKLHEKLAVLEGRVQKIATDIKKTKEMLDENNPDEPKQILSNIQKEITAIEKAISHVKDDNKIQLGTAENSECENSHPETAEKCTIAKPGDLKQAGKGLNADELEARFLPHHKLLRGHISSTSTQQESSVGMRKDCNGKTRSAASNPDDDENSIAMEFLASLDGEENDFFKERKAKKLEKNKTCEVADATSKTSSQGSSKNPVVPNHKEETELLATEELEEFDDRENKSSMMLQEETDESCNSQLSGIGNKSSTGGWFVSEGEAVLLAHGDGTCSYYDIANHEFKSEYKPPSMVSNNMWGDCWLIRAPGVDGCSGRYVVAASAGNALDPGFCSWDYYTREVKSFHVEEEASQASAPTSRAILGALSNVGSSRSSSALSNAERQQWWYRPCGPLLLSTASKQKMVTAYDIRDGDVVMKWEVSNPVMGMEYSSPLQWRSKGKVVIAGSESIGLWDVNSLNPQPLLSVASGKKLYCLHVNNTDAEVGGGVRQRVSSSEVEGNDGVFSTQESVNVFDFRVPAGIGLKIARHGGTANSIFSRGDSVFIGSTEGRLQIKGGSRSRVQHYSLRKGKLVATYELPEFCNVCHVIYVLRLCFTCDAICRVKHLAFTVVLASRCYLVLTPGMIN

SEQ ID NO: 2356 - protein, 375 aa, Saccharum officinarum
MGAEAGHPQQQPPSSLRPGREAAAAAPPAVLGLQLSALIDHVARVDWSLLDRVPGDRGGSQQVSIEELNHILDEVNAHILPSRNDLTPVTTIAGGSVANTIRGLSAGFGISTGIIGACGDDNQGLLFVNNMSFSGVDLTRLRAKKGHTAQCVCLVDASGNRTMRPCLSTAVKIQANEFRKEDFKGSKWLIVRYAQQNMEQIIEAIRIAKQEGLSVSLDLASFEMVRDSRSKLINLLETGNIDLCFANEDEAREVIGGGLESDPEEALAFLGKYCKWAVVTLASKGCMAKHGKQVVQVPAIGESNAVDTTGAGDLFASGFLYGLVKGLPLEECCKVGACSGGSVTRALGGEVRPENWQWMYKQMHARGLLLPELKN

SEQ ID NO: 2357 - protein, 376 aa, Sorghum bicolor
MGAEAGHTQQQPPSSLRPGREAAAAAAPPAVLGLQLSALIDHVARVDWSLLDRVSGDRGGSQQVSIEELNHILDEVNAHILPSRNDLTPITTIAGGSVANTIRGLSAGFGISTGIIGACGDDNQGRLFVNNMSFSGVDLTRLRAKKGHTAQCVCLVDASGNRTMRPCLSSAVKIQANEFRKEDFKGSKWLIVRYAQQNMEQIIEAIRIAKQEGLSVSLDLASFEMVRDSRSKLINLLETGNIDLCFANEDEAREVIGGGLESDPEEALAFLGKYCKWAVVTLASKGCMAKHGKQVVQVPAIGESNAVDTTGAGDLFASGFLYGLVKGLPLEECCKVGACSGGSVTRALGGEVRPENWQWMYKQMNARGLLLPELKN

SEQ ID NO: 2358 - protein, 372 aa, Zea mays
MGAEAAHPQQQPPSSVRPCREAAAPAVLGLQLSALIDHVARVDWSLLDRVPGDRGGSQQVSIVELNHILNEVNTHILPSHNDLTPITTIAGGSVANTIRGLSAGFGISTGIIGACGDDNQGLLFVNNMSFSGVDLTRLRAKKGHTAQCVCLVDASGNRTMRPCLSSAVKIQANEFRKEDFKGSKWLIVRYAQQNMEQIIEAIRIAKQEGLSVSLDLASFEMVRDSRSKLINLLETGNIDLCFANEDEAREVIGGGLESDPEEALAFLGKYCKWAVVTLASKGCMAKHGKQVVQVPAIGESNAVDTTGAGDLFASGFLYGLVKGLPLEECCMVGACSGGSVTRALGGEVRPENWQWMYKQMHARGMLLPELKN

SEQ ID NO: 2359 - protein, 373 aa, Panicum virgatum
MGAEAEHPQQQQPPSAVRPGRAAAAPAVLGLQLSALIDHVARVDWSLLDRVPGDRGGSQQVSIDELNHILTEVNAHILSSRNDLTPITTIAGGSVANTIRGLSAGFGISTGIIGACGDDSQGILFVNNMSFSGVDLTRLRAKKGHTAQCACLVDASGNRTMRPCLSSAVKMQANEFRKEDFKGSKWLVVRYAQQNMEQIIEAIRIAKQEGLSVSLDLASFEMVRDSRSKLINLLETGNIDLCFANEDEAREVIGGDPTSNPEEALAFLGKYCKWAVVTLASKGCMAKHGKQVVQVPAIGESNAVDTTGAGDLFASGFLYGLVKGLPLEECCKVGACSGGSVTRALGGEVRPENWQWMYKQMHARGLLLPELKN

SEQ ID NO: 2360 - protein, 373 aa, Echinochloa colona
MGAEAEHPHQQPPSSLRPSREAAAPPAVLGLQLSALIDHVARVDWSLLDRVPGDRGGSQQVSIEELNHILTEVNAHILPSRNDLTPITTIAGGSVANTIRGLSAGFGISTGIIGACGDDNQGILFVNNMSFSGVDLTRLRAKKGHTAQCACLVDASGNRTMRPCLSSAVKMQANEFRKEDFKDSKWLVVRYAQQNMEQIMEAIRIAKQEGLSVSLDLASFEMVRDSRLKLINLLESGNIDLCFANEDEAREVIGGGPTSNPEEALVFLGKYCKWAVVTLASKGCMAKHGKQVVQVPAIGESSAVDTTGAGDLFASGFLYGLVKGLPLEECCKVGACSGGSVTRALGGEVRPENWQWMYKQMHARGLLLPELKN

SEQ ID NO: 2361 - protein, 373 aa, Echinochloa colona
MGAEAEHPHQQPPSSLRPSREAAAPPAVLGLQLSALIDHVARVDWSLLDRVPGDRGGSQQVSIEELNHILTEVNAHILPSRNDLTPITTIAGGSVANTIRGLSAGFGISTGIIGACGDDNQGILFVNNMSFSGVDLTRLRAKIGHTAQCACLVDASGNRTMRPCLSSAVKMQANEFRKEDFKGSKWLVVRYAQQNLEQIIEAIRIAKQEGLSVSLDLASFEMVRDSRLKLINLLESGNIDLCFANEDEAREVIGGGPTSNPEEALAFLGKYCKWAVVTLASKGCMAKHGKQVVQVPAIGESSAVDTTGAGDLFASGFLYGLVKGLPLEECCKVGACSGGSVTRALGGEVRPENWQWMYKQMHARGLLLPELKN

SEQ ID NO: 2362 - protein, 374 aa, Setaria italica
MGAEAEHPQQPPSSLRPGWEAAAAAAPAVLGFQLSALIDHVARVDWSLLDRVPGDRGGSQQVSIEELNHILTEVNAHILPSRNDLTPITTMAGGSVANTIRGLSAGFGISTGIIGACGDDNQAILFVDNMSFSGVDLTRLRPKKGHTAQCACLVDASGNRTMRPCLSSAVKLQANEFREEDFKGSKWLVVRYAQQNMEQIIEAIRIAKQEGLSVSLDLASFEMVRDSRLNLINLLETGNIDLCFANEDEARELIEGGPTSDPEEALAFMGKYCKWAVVTLASKGCMAKHGKQVVKVPAIGESNAVDTTGAGDLFASGFLYGLVKGLPLEDCCKVGACSGGSVTRALGGEVRPENWQWMYKQMHARGLLLPELKN

SEQ ID NO: 2363 - protein, 358 aa, Pennisetum glaucum
GREAAAAVAAPAVLGLQLSALIDHVARVDWSLLDRVPGDRGGSQQVSIEELNHILTEVNAHILPSRNDLTPITTMAGGSVANTIRGLSAGFGISTGIIGACGDDNQAILFVDNMSFSGVDLTRLRAKKGYTAQCACLVDASGNRTMRPCLSSAVKLQANEFRKEDFRGSKWLVVRYAQQNLEQIIEAIRIAKQEGLSVSLDLASFEMVRDSRLKLINLLETGNIDLCFANEDEARELIGGGPTSDPDEALAFLGKYCKWAVVTLASKGCMAKHGKQVVQVPAIGESNAVDTTGAGDLFASGFLYGLVKGLPLEDCCKVGACSGGSVTRALGGEVRPENWQWMYKQMHARGLLLPELKN

SEQ ID NO: 2364 - protein, 363 aa, Brachypodium distachyon
MGAEAEQQQAPSSPPPVVVGLQLSALIDHVAHVDWSLLDRVPGDRGGSQQVSFEELNHILTEVNALILPSRDDLSPVRTMAGGSVANTIRGLSAGFGISTGIIGARGDDDQGLLFVNNMSFSGVDLTRLRTKKGHTAQCACLVDASGNRTMRPCLSSAVKLQANEFVKEDFQGSKWLVVRYAQQNLEQIIEAIRVAKQEGLSVSLDLASFEMVRDYRLQLIALLETGNIDLCFANEDEAREIIGGELTFDPEVALAFLSKYCKWAVVTLASKGCLAKHGKQVVQVPAIGESNAVDATGAGDLFASGFLYGLVKGLPLEECCKVGACSGGSVIRALGGEVRPENWQWMYKQMHAGGLLLPELKN

SEQ ID NO: 2365 - protein, 371 aa, Aegilops tauschii
MGAEAEQQQQLPPPSPQAGKADPPAVVGLQVSALIDHVARVDWSLLDRVPGDRGGSQQVSFEELDHILNEVNALILPSHDDPSPVRTMAGGSVANTVRGLSAGFGISTGIIGARGDDDQGILFVNNMSFSGVDLTRLRAKKGHTAQCACLVDASGNRTMRPCLSSAVKLQANEFTKEDFQGSKWLVVRYAQQNLAQIIEAIRVAKQEGLSVSLDLASFEMVRDYRSQLIALLETGNIDLCFANEDEAREIIGGGLTYDPEDALAFLSKHCKWAVVTLASKGCIAKHGKQVVHVPAIGESNAVDATGAGDLFASGFLYGLVKGLPLEECCKVGVCSGGSVVRALGGEVRPENWQWMYKQMHAGGLLLPELKN

SEQ ID NO: 2366 - protein, 372 aa, Hordeum vulgare
MGAEAEQQQQQLPLPSPQAGKADPPAVVGLQVSALIDHVAHVDWSLLDRVPGDRGGSQQVSFEELDHILNEVNALILPSHDDPSPVRTMAGGSVANTVRGLSAGFGISTGIIGARGDDDQGILFVNNMSFSGVDLTRLRAKKGHTAQCACLVDASGNRTMRPCLSSAVKLQANEFTKEDFQGSKWLVVRYAQQNLAQIIEAIRVAKQEGLSVSLDLASFEMVRDYRSQLIALLETGNIDLCFANEDEAREIIGGGLTFDPEDALAFLSKHCKWAVVTLASKGCIAKHGKQVVQVPAIGESNAVDATGAGDLFASGFLYGLVKGLPLEECCKVGACSGGSVTRALGGEVRPENWQWMYKQMHAGGLLLPELKN

SEQ ID NO: 2367 - protein, 371 aa, Triticum aestivum
MGAEAEQQQQLPPPSPQAGKADPPAVVGLQVSALIDHVARVDWSLLDRVPGDRGGSQQVSFEELDHILNEVNALILPSHDDPSPVRTMAGGSVANTVRGLSAGFGISTGIIGARGDDDQGILFVNNMSFSGVDLTRLRAKKGHTAQCACLVDASGNRTMRPCLSSAVKLQANEFTKEDFQGSKWLVVRYAQQNLAQIIEAIRVAKQEGLSVSLDLASFEMVRDYKSQLIALLETGNIDLCFANEDEAREIIGGGLTYDPEDALAFLSKHCKWAVVTLASKGCIAKHGKQVVQVPAIGESNAVDATGAGDLFASGFLYGLVKGLPLEECCKVGVCSGGSVVRALGGEVRPENWQWMYKQMHAGGLLLPELKN

SEQ ID NO: 2368 - protein, 379 aa, Oryza sativa
MGAEAEHRMSPSPAPAPAPPTPVGRTDGDAPPMVLGLQLSALIDHVARVDWSLLNRIPGDRGGSQQVCIEELNHILAEVNAQILPCRDDLSSIRTIAGGSVANTIRGLSAGFGISTGIIGACGDDSQGVLFVSNMSFSGVDLTRLRTKKGHTAQCACLVDASGNRTMRPCLSSAVKLQANEFKKEDFKGSKWLVVRYARQNMEQILEAIRIAKQEGLSVSLDLASFEMVRDYRTQLIDLLETGNIDLCFANEDEARELLGGELTFDPEEALAFLAKYCKWAVVTLASKGCIAKHGKQVVQVAATGESNAVDATGAGDLFASGFLYGLVKGLALEECCKVGACSGGSVVRALGGEVRPENWQWMYKQMNASGLLLPDLKN

SEQ ID NO: 2369 - protein, 359 aa, Lolium multiflorum
MVAEADHQQPGRPAGRAADPPAVLGLQVSALIDHVAHVDWSLLDRVPGDRGGSQQVSFEELNHILNEVNALILPSSDGLSPVRTMAGGSVANTIRGLSAGFGISTGIIGARGDDDQGVLFVNNMSFSGVDLTRLRAKKGHTAQCACLVDASGNRTMRPCLSSAVKLQANEFTREDFQGSKWLVVRYAQQNLGQIVEAIRVAKQEGLSVSLDLASFEMVRDYRSQLIALLETGNIDLCFANEDEAREIIGEGLTFDPEEALAFLSKYCKWAVVTLASKGCLAKHGKQVVQVPAIGESNAVDATGAGDLFASGFLYGLVKGLPLEECCKVGACSGGSVIRALGGEVRPENWQWMYKQMHAG

SEQ ID NO: 2370 - protein, 378 aa, Avena sativa
MGVPGETEGTVTGAEAEHQQPGRADGAADPPAVLGLQVSALIDHVARVDWSLLDRVPGDRGGSQQVTFEELNHILTEVNALILPSSDDLTPVRTMAGGSVANTIRGLSAGFGISTGIIGARGDDDQGVLFVNNMSFSGVDLTRLRAKKGHTAQCACLVDASGNRTMRPCLSSAVKLQANEFTKEDFQGSKWLVVRYAQQNLGQIIEAIRVAKQEGLSVSLDLASFEMVRDYRSQLVALLETSNIDLCFANEDEAREIIGGGLTFDPEEALAFLSKYCKWAVVTLASKGCLAKHGKQVVQVPAIGESNAVDATGAGDLFASGFLYGLVKGLPLEECCKVGACSGGSVIRALGGEVRPENWQWMYKQMHAGGMVPPELKN

SEQ ID NO: 2371 - protein, 351 aa, Avena sativa
ADPPAVLGLQVSALIDHVARVDWSLLDRVPGDRGGSQQVTFEELNHILTEVNALILPSSDDLTPVRTMAGGSVANTIRGLSAGFGISTGIIGARGDDDQGVLFVNNMSFSGVDLTRLRAKKGHTAQCACLVDASGNRTMRPCLSSAVKLQANEFTKEDFQGSKWLVVRYAQQNLGQIIEAIRVAKQEGLSVSLDLASFEMVRDYRSQLVALLETGNIDLCFANEDEAREIIGGGLTFDPEEALAFLSKYCKWAVVTLASKGCLAKHGKQIVQVPAIGESNAVDATGAGDLFASGFLYGLVKGLPLEECCKVGACSGGSVIRALGGEVRPENWQWMYKQMHAGGMVPPELKN

SEQ ID NO: 2372 - protein, 343 aa, Secale cereale
LQVSALIDHVARVDWSLLDRVPGDRGGSQQVSFEELDHILNEVNALILPSHDDPSPVRTMAGGSVANTVRGLSAGFGISTGIIGARGDDDQGILFVNNMSFSGVDLTRLRAKKGHTAQCACLVDASGNRTMRPCLSSAVKLQVNEFTKEDFQGSKWLVVRYAQQNLAQIIEAIRVAKQEGLSVSLDLASFEMVRDYRSQLIALLETGNIDLCFANEDEAREIIGGGLTFDPEDALAFLSKHCKWAVVTLASKGCIAKHGKQVVQVPAIGESNAVDATGAGDLFASGFLYGLVKGLPLEECCKVGACSGGSVIRALGGEVRPENWQWMYKQMHAGGLLLPELKN

SEQ ID NO: 2373 - protein, 740 aa, Zea mays
MPPPRRALVTSLLRLRSFSSIAYPHPYPPAPLRRHQFVADPTTSTNRGVVGGIGGVGSGNGNILDPTQLLRDDPVAITASLWVSSFRAAASTSGSCTPAPPQPLTPFLSRLELWVLAYQKAYADETGSYLPRSSIPASTLASLLTLRNAVLDGRFRFGNRLTPILQSPRAANAPDPATLSKRKLRALLTTPGPSPFQDRVVQELLLLLLEPVYEARFSPKSFAFRPGRSPHAAIRTIRRSFAPYLWYIKGDLSPLLHSPDHALVVGALIRDVRDKKVVDLIRSALLTPVVTASDDAAVKKKKTKRKYQKKKVLPEGEPKPDPYWLQTFFGFAPEEAQTQPDWGHCGVLSPLLANVCLDEFDKWMEERIKEFYKPSKSDVVGGDDGIEQGNTSWPEFVPTTGPDKTRKVDYIRYGGHFLIGVRGPRADAAVLRKQLVEFCDQRFRIKLDNESLPIEHITKGVMFLDHVLCRRVVYPTLRYTATGGKIISEKGVGTLLSVTASLKQCIKQFRKLEFLKGDREPDPQPCFRMFHATQSHTNSQMNKLLLTMAEWYRYADNRKKVVNFCSYIIRGSLAKLYAAKYKLRSRAKVYKIASRNLSRPLKDKKGQSPEYHNLLRMGLVDSIDGLQYTRMSMVPDPDYTPLPFGWRPDHEKILLEYIKLTDQQTLEEQRNCIREDGLITPQDNISMLVWGYKKNAVLLPSKVSDAQGSTEDLGSDTDELDEKELGNEGNQSFQKLAEMS

SEQ ID NO: 2374 - protein, 739 aa, Sorghum bicolor
MPPPRRALLTSLLRLRSFSSIAYPHPHPPAPPRRHQFVADPTTSTSRGVIGGIGGGSGNPLDPTQLLRDDPVAITASLWVSSFRAAAAASGSGSCTSAPPQSLTPFLSRLELWVLAYQKAYADETGSYLPRSSIPASTLTSLLTLRNAVLDARFRFGNRLTPFLQSPRAANAPDPATLSKRKLRALLTTPGPPPFQDRVVQELLLLLLEPVYEARFSPKSFAFRPGRSPHAAIRTIRRSFAPYLWYIKGDLSPLLHSPDPALVVGALIRDVRDKKVVDLIRSALLTPVVTASDDAAAKKKKTKRKYQKKKVLPEGEPKPDPYWLQTFFGFAPEEAQTQPDWGHCGVLSPLLANVCLDELDKWIEEKIKELYKPSKLDVVGGDDGIEQGNTSWPEFVPTSGPDKTRKVDYIRYGGHFLIGVRGPRADAAVLRKQLVEFCDQRFRIKLDNESLPIEHITKGVMFLDHVLCRRVVYPTLRYTATGGKIISEKGVGTLLSVTASLKQCIKQFRKLEFLKGDREPDPQPCFRMFHATQAHTNSQMNKLLLTMAEWYRYADNRKKVVNFCSYIIRGSLAKLYAAKYKLRSRAKVYKIASRNLSRPLKDKKGQSPEYHNLLRMGLVDSIDGLQYTRMSMVPDPDYTPLPSGWRPDHERILLEYIKLTDQQTLEEQRNCIREEGLITPQDYISMLVWGYKKNAVLLPSKVSDAQGSTEDLGSDTDELDEKELGNEGNQSFPKLAEMS

SEQ ID NO: 2375 - protein, 743 aa, Setaria italica
MPPPRRALLTSLLRLRAFSSIASPHPHPPAPPRRHQFQFVSDPAASTSRGVLGGIGGAGAGSGNPLDPTQLLRDDPVAITASLWVSSFRATADSVSASSTPAPPQSLTPFLSRLELWVLAYQKAYADETGSYLPRSSIPASTLASLLSLRNAVLDARFRFGNRLTPFIQSPRSANAPDPATLSKRKLRALLTTPGPPPFQDRVVQELLLLLLEPVYEARFSPKSFAFRPGRSPHAAIRTIRRSFAPYLWYIKGDLSPLLHSPDPALVVGALIRDVRDKKVVDLIRSALLTPVVTASDDAAVKKKTKRKYQKKKVLPEGEPKPDPYWLQTFFGFAPEEAMTQPDWGHCGVLSPLLANVCLDELDKWMEEKIKEFYKPSKSDVVGGDDGIEQGNTSWPEFVPTSGPDKTRKVDYIRYGGHFLIGVRGPRADAAVLRKQLVEFCDQRFRVKLDNESLPIEHITKGIMFLDHVLCRRVVYPTLRYTATGGKIISEKGVGTLLSVTASLKQCIKQFRKLEFLKGDREPDPQPCFRMFHATQAHTNSQMNKLLLTMAEWYRYADNRKKVVNFCSYIIRGSLAKLYAAKYKLRSRAKVYKIASRNLSRPLKDKKGQSPEYHNLLRMGLLDSIDGLQYTRMSMVPDPDYTPLPSGWRPDHEKILLEYIKLTDQQTLEEQRTCIREEGLITPQDYISMLVWGYKKNAVLLPSSKGSDTQGSTEDIGSDTDELGEKELGNEGRQGFPKFAEMS

SEQ ID NO: 2376 - protein, 739 aa, Panicum virgatum
MPPPRRALLTSLLRLRGFSSIASHHPHPPAPPRRHQFVADPNASTSRSVAGAIGGGSGNPLDPTQLLRDDPVAITASIWVSSFRAAAASASASASPAPPQSLTPFLSRLELWVLAYQKAYADETGSYLPRSSIPASTLASLLSLRNAVLDARFRFGNRLTPFLQSPRAANAPDLATLSKRKLRALLTTPGPPPFQDRVVQELLLLLLEPVYEARFSPKSFAFRPGRSPHAAIRTIRRSFAPYLWYIKGDLSPLLHSPDPALVVGALIRDVCDKKVVDLIRSALLTPVVTASDDAGVKKKKTKRKYQKKKVLPEGEPKPDPYWLQTFFGFAPEEAQMQPDWGHCGVLSPLLANVCLDELDKWMEEKIKEFYKPSKSDVVGGDDGIEQGNTSWPEFVPTSGPDKTRKVDYIRYGGHFLIGVRGPRADAAVLRKQLVEFCDQRFRIKLDNENLPIEHITKGIMFLDHVLCRRVVYPTLRYTATGGKIISEKGVGTLLSVTASLKQCIKQFRKLEFLKGDREPDPQPCFRMFHATQAHTNSQMNKLLLTMAEWYRYADNRKKVVNFCSYIIRGSLAKLYAAKYKLRSRAKVYKIASRNLSRPLKDKKGQSPEYHNLLRMGLVDSIDGLQYTRMSMVPDPDYTPLPSGWRPDHEKILLEYIKLTDQQTLEEQRACIREEGLITPQDYISMFVWGYKKNAVLLPSSKDSDAHESTEDLGSDTDELAEKELGNEGCQRFPKFAEMS

SEQ ID NO: 2377 - protein, 743 aa, Panicum virgatum
MPPPPRRALLTSLLRLRGFSSIASPHPHPHPPAPPRRHQFVADPTASTSRSVVGAVGGGSGNPLDPTQLLRDDPVAITASLWVSSFRAAAASSASPASTPAPPQSLTPFLSRLELWVLAYQKAYADETGSYLPRSSVPASTLASLLSLRNAVLDARFRFGNRLTPFLQSPRAANAPDPATLSKRKLRALLTTPGPPPFQDRVVQELLLLLLEPVYEARFSPKSFAFRPGRSPHAAIRTIRRSFAPYLWYIKGDLSPLLHSPDPALVVGALIRDVRDKKVVDLIRSALLTPVVTASEDAGVKKKKTKRKYQKKKVLPEGEPKPDPYWLQTFFGFAPEEAQMQPDWGHCGVLSPLLANVCLDELDKWMEEKIKEFYKPSKSDVVGGDDGIEQGNTSWPEFVPTSGPDKTRKVDYIRYGGHFLIGVRGPRADAAVLRKQLVEFCDQRFRIKLDNESLPIDHITKGIMFLDHVLCRRVVYPTLRYTATGGKIISEKGVGTLLSVTASLKQCIKQFRKLEFLKGDREPDPQPCFRMFHATQAHTNSQMNKLLLTMAEWYRYADNRKKVVNFCSYIIRGSLAKLYAAKYKLRSRAKVYKIASRNLSRPLKDKKGQSPEYHNLLRMGLVDSIDGLQYTRMSMVPDPDYTLLPSGWRPDHEKILLEYIKLTDQQMMEEQRACIREEGLITPQDYISMLVWGYKKNAVLLPSSKDRDAHGSTEDLCSDADELGEKELGNEGCQGPPKFAEMS

SEQ ID NO: 2378 - protein, 736 aa, Brachypodium distachyon
MPPPRHALLSSLLRLPRASSSLAFHPPRPPPTRRHQFVADPNAAASRSGVGVGGNPLDPAQLLRDDPVSITASLWVSSFRAAATSPEDAAPPPPPPSLSPFLTRLELWVLAYQKAYADDTGSYLPRSSIPASTLASLLTLRNAVIDARFRFGNRLTPYLQSPRAAANPDPATLSKRKLRALLTTPGPAPFQDRVVQELLLLLLEPVYEARFSPKSFAFRPGRSPHAALRSIRRTWAPYLWYIKGDLSPLLDSPDPALVVGALIRDVRDKKVVDLIRSALLTPVVTGRPGDEDASKKKKKRKYQKKKVLPEGEPKPDPYWLQTFFGFAPEEALTQPDWGHCGVLSPLLANVCLDEFDKWMDEKIKEFYKPSKSDVVGGEDGVEQGNTSWPEFVPTSGPDKTRKVDYIRFGGHFLIGVRGPRADAAIIRKQLVEFCDQRFRIKLDNESLPIEHITKGIMFLDHVLCRRVVYPTLRYTATGGKIISEKGVGTLLSVTASLKQCIKQFRKLEFLKGDREPDPQPCFRMFHATQSHTNSQMNKLLLTMAEWYRYADNRKKIVNFCSYIIRGSLAKLYAAKYKLRSRAKVYKIASRNLSRPLKDKKGQSPEYHNLLRMGLVDSIDGLQYTRMSMVPDPDYTPLPSGWRPDHEKFLLEYIKLTDQQTLEEQRSCIREEGLITPQDQISMLVWSYKKNAVLLPSSKESDVQGSIEDLGSDTDEMNNKELGHEGHQGFSQPAEMS

SEQ ID NO: 2379 - protein, 734 aa, Hordeum vulgare
MPQPHRALLSSLLRIRACSSLAHRPPRPPTPSPRRHQFVADPNAAAGTGRGSVGGNPLDPTQLLRDDPVSITASLWVSSFRAAAPDDAAPPPPPPLAPFLTRLELWVLAYQKAYADETGSYLPRSSIPASTLTSILTLRNAVIDSRFRFGNRLTPYLHSPRAAAAPDPATLSKRKLRALLTTPGPAPFQDRVVQELLLLLLEPVYEARFSPKSFAFRPGRSPHAALRSIRRSWAPYLWYIKGDLSPLLDSPDPALVVGALIRDVRDKKVVDLVRSALLTPEVTARPGDDDASKKKKKRKYQKKKVLPEGEPKPDPYWLQTFFGFAPEEALTQPDWGHCGVLSPLLANVCLDEFDKWMDEKIKEFYKPSKSDVVGGEDGIEQGNTSWPEFVPTSGPDKTRKVDYIRFGGHFLIGVRGPRADAAVIRKQLIEFCDQRFRIKLDNETLPIEHITKGIMFLDHVLCRRVVYPTLRYTATGGKIISEKGVGTLLSVTASLKQCIRQFRKLEFLKGDREPDPQPCFRMFHATQAHTNSQMNKLLTTMAEWYRYADNRKKVVNFCSYIIRGSLAKLYAAKYKLRSRAKVYKIASRNLSRPLKDKKGQSPEYTNLLRMGLVDSVDGLQYTRMSMVPDPDYTPLPSGWRPDHEKFLLEYIKLTDQQTLEEQRSCIREEGLITPQDHISMLVWSYKKNAVLLPSSKESDVQESTEDLGSDIDELNNKELGHGGHQGFPQPTEMS

SEQ ID NO: 2380 - protein, 733 aa, Oryza sativa
MPPPPPRRALLAPLLRLRAFSSSSSSLAHHPPLPPPPRRHQFVAADAITGQGGGGNPLDPAQLLRDDPVAITASLWVSSFRPQPTAAAPPPPSLSPFLSRLELWVLAYQKAYADETGSYLPRSSIPASTLSSLLALRNAVLDARFRFGNRLTPFLRSPRAAAAAQDPATLSKRKLRALLTTPGPAPFQDRVVQELLLLLLEPVYEARFSPKSFAFRPGRSPHAAIRTIRRSFAPYLWYIKGDLSPLLHSPDPALVVGALIRDVRDKKVVDLVRSALLTPPVTARPGDEDAAKKKKKRKYQKKKVLPEGEPKPDPYWLQTFFGFAPEEALTQPDWGHCGVLSPLLANVCLDELDKWMEEKIKELYRPSKSDVVGGEDGVEQGNTSWPEFVPTSGPDKTRKVDYIRFGGHFLIGVRGPRADAAVLRKQLVEFCDQRFRIKLDNESLPIEHITKGIMFLDHVLCRRVVYPTLRYTATGGKIISEKGVGTLLSVTASLKQCIKQFRKLEFLKGDREPDPQPCFRMFHATQAHTNAQMNKLLLTMAEWYRYADNRKKVVNFCSYIIRGSLAKLYAAKYKLRSRAKVYKIASRNLSRPLKDKKGQSPEYHNLLRMGLVDSIDGLQYTRMSMVPDPDYTPLPSGWRPDHEKILLEYIKLTDQQTLDEQRSCIREEGLITPQDYISMLVWSYKKNAVLLPSFKENDHKGSTEDLGSDTDELGDEEIGNLDHVDSPKVAEMP

SEQ ID NO: 2381 - protein, 256 aa, Saccharum officinarum
  Sequence also found in Organisms: Sorghum bicolor
MDGGGSGPAPNAARTADEVFRDYKARRAGMIKALTTDVERFFKLCDPEKENLCLYGYPNETWEVTLPAEEVPPEIPEPALGINFARDGMNEKDWLALVAVHSDSWLLSVAFYFGARFGFDREARRRLFSMINNMPTIFEVVTGAVKKQAKEKTPNSSSKSNKPSSKVQSRAESRSKAKVPKDEEESGDDDGDEEAEEHDNTLCGTCGTNDGKDQFWICCDNCEKWYHGKCVKITPARAEHIKQYKCPDCTNKRARA

SEQ ID NO: 2382 - protein, 255 aa, Panicum virgatum
MDGGGSGAAPYAARTAEEVFRDYRARRAGMIKALTTDVDKFFKLCDPEKENLCLYGYPNETWEVTLPAEEVPPEIPEPALGINFARDGMNEKDWLALVAVHSDSWLLSVAFYFGARFGFDKEARKRLFSMINNMPTIFEVVTGSAKKQTKEKTPNSSSKSNRPSSKVQSRAESRSKAKVPKDEEESGDDDGDEAEEHDNTLCGTCGTNDGKDQFWICCDNCEKWYHGKCVKITPARAEHIKQYKCPDCTNKRARA

SEQ ID NO: 2383 - protein, 256 aa, Setaria italica
MDGGGSGAAPNAARTAEEVFRDYRARRAGMIKALTTDVDKFFKLCDPEKENLCLYGYPNETWEVTLPAEEVPPEIPEPALGINFARDGMNEKDWLALVAVHSDSWLLSVAFYFGARFGFDKEARRRLFSMINNMPTIFEVVTGSAKKQTKEKTPNSSSKSNKPSSKVQSRAEARSKAKVPKDEEESGDDDGDEEAEEHDNTLCGTCGTNDGKDQFWICCDNCEKWYHGKCVKITPARAEHIKQYKCPDCTNKRARV

SEQ ID NO: 2384 - protein, 258 aa, Panicum virgatum
MDGGGSGAAPYAARTAEEVFRDYRARRAGMIKALTTDVDKFFKLCDPEKENLCLYGYPNETWEVTLPAEEVPPEIPEPALGINFARDGMNEKDWLALVAVHSDSWLLSVAFYFGARFGFDKEARRRLFSMINNMPTIFEVVTGTGSAKKQTKEKTPNSSSKSNRPSSKVQSRAESRSKAKVPKDGEESGDDDGDEEAEEHDNTLCGTCGTNDGKDQFWICCDNCEKWYHGKCVKITPARAEHIKQYKCPDCTNKRARA

SEQ ID NO: 2385 - protein, 257 aa, Zea mays
MDGGGSGPAPNAAHTAEEVFRDYKARRAGMIKALTTDVERFFKLCDPEKENLCLYGYPDETWEVTLPAEEVPPEIPEPALGINFARDGMNEKDWLALVAVHSDSWLLSVAFYFGARFGFDREARRRLFSLINNMPTIFEVVTGAVKKQQAKEKTPNSSSKSNKPSSKVQSRAESRSKAKVPKDEEESGDDDGDEEAEEHDNTLCGTCGTNDGKDQFWICCDNCEKWYHGKCVKITPARAEHIKQYKCPDCTNKRVRA

SEQ ID NO: 2386 - protein, 256 aa, Zea mays
MNGGGSGLAPNAAHTADEVFRDYKGRRAGMIKALTTDVERFFKLCDPEKENLCLYGYPDETWEVTLPAEEVPPEIPEPALGINFARDGMNEKDWLALVAVHSDSWLLSVAFYFGARFGFDRETRRRLFSLINNMPTIFEVVTGAAKKQAKEKTPNSSSKSNRPSSKVQSRAESRSKAKVPQDEEESGDDDEDEEADEHNNTLCGTCGTNDSKDQFWICCDNCEKWYHGKCVKITPARAEHIKQYKCPDCTNKRARA

SEQ ID NO: 2387 - protein, 260 aa, Brachypodium distachyon
MDPGAGAGAPYASRTAEEVFRDFRGRRAGMIKALTQEVEKFYQLCDPEKENLCLYGYPNETWEVTLPAEEVPPEIPEPALGINFARDGMNEKDWLALVAVHSDSWLLSVSFYFAARFGFDKEARRRLFNMINNLPTIFEVVTGAAKKQTKEKGPNSTNKNNKPSTKIPSRPESHSKAPKVVAPPKDEDDSGEDYGEEEEEERDNTLCGTCGTNDGKDEFWICCDNCERWYHGKCVKITPARAEHIKHYKCPDCSNKRARA

SEQ ID NO: 2388 - protein, 265 aa, Avena sativa
MEGAGAGAAYTARTAEEVFRDLRGRRAGMIRALTDDVDKFFKLCDPEKENLCLYGYPNETWEVTLPAEEVPPEIPEPALGINFARDGMNEKDWLALVAVHSDSWLLSVAFYFGARFGFDKETRRRLFNMINNLPTIYEVVTGAAKRQSKEKTPNTNSSSKSNKPSSKVQSRAAEPRAKAKLSAPKDEEEDSGDDGGDDEEEEHDNTLCGTCGTNDGKDEFWICCDNCEKWYHGKCVKITPARAEHIKQYRCPECGNGGSNKRIKT

SEQ ID NO: 2389 - protein, 263 aa, Triticum aestivum
MDAGAGAGAGAPYASRTAEEVFRDFRGRRAGMIKALTQEVDKFYQLCDPEKENLCLYGYPNETWEVTLPAEEVPPEIPEPALGINFARDGMNEKDWLALVAVHSDSWLLAVSFYFAARFGFDKEARRRLFNMINNLPTIFEVVTGAAKKQIKEKAPNSTHKSNNKPSMKTYSKPESQSKAPKIAAPPKDEDESGEDYGEEEEEERDNTLCGTCGTNDGKDEFWICCDNCERWYHGKCVKITPARAEHIKHYKCPDCSNKRARA

SEQ ID NO: 2390 - protein, 262 aa, Aegilops tauschii
MDAAGAGAGAPYASRTAEEVFRDFRGRRAGMIKALTQEVDKFYQLCDPEKENLCLYGYPNETWEVTLPAEEVPPEIPEPALGINFARDGMNEKDWLALVAVHSDSWLLAVSFYFAARFGFDKEARRRLFNMINNLPTIFEVVTGAAKKQIKEKAPNSTHKSNNKPSMKTYSKPESQSKAPKIAAPPKDEDESGEDYGEEEEEERDNTLCGTCGTNDGKDEFWICCDNCERWYHGKCVKITPARAEHIKHYKCPDCSNKRARA

SEQ ID NO: 2391 - protein, 261 aa, Secale cereale
MDAGAGAGAPYASRTAEEVFRDFRGRRAGMIKALTQEVDKFYQLCDPEKENLCLYGYPNETWEVTLPAEEVPPEIPEPALGINFARDGMNEKDWLALVAVHSDSWLLAVSFYFAARFGFDKEARRRLFNMINNLPTIFEVVTGAAKKQIKEKGPNSTHKSNNKPSMKTHSRPESQSKAPKMAAPPKDEDESGEDYGEEEEEERDNTLCGTCGTNDGKDEFWICCDNCERWYHGKCVKITPARAEHIKHYKCPDCSNKRARA

SEQ ID NO: 2392 - protein, 262 aa, Avena sativa
MDAGAGAGAGAPYASRTAEEVFRDFRGRRAGMIKALTLEVDKFYQLCDPEKENLCLYGYPNETWEVTLPAEEVPPEIPEPALGINFARDGMNEKDWLALVAVHSDSWLLAVSFYFAARFGFDKESRRRLFNMINNLPTIFEVVTGAAKKQTKEKPPNSTTKSNKPSMKMPSRPESHSKAPKMPAPPKDEDESGEEYGEEEEEERDNTLCGTCGTNDGKDEFWICCDNCERWYHGKCVKITPARAEHIKHYKCPDCSNKRARA

SEQ ID NO: 2393 - protein, 263 aa, Aegilops tauschii
MDGAGAGGAYVARTAEEVFRDLRGRRAGMIKALTEDVDKFFKLCDPEKENLCLYGYPNETWEVTLPAEEVPPEIPEPALGINFARDGMNEKDWLALVAVHSDSWLLSVAFYFGARFGFDKENRRRLFNMINNLPTIYEVVTGIAKKQSKEKTPNSSSKSSKPSMKVLSRAEPRAKAKVPAPKDEEESGEDEGDEEEEEHDNTLCGTCGTNDGKDEFWICCDNCEKWYHGKCVKITPARAEHIKHYRCPECTNGGSNSNKRVKT

SEQ ID NO: 2394 - protein, 257 aa, Panicum virgatum
MDPGAGAHYTARTAEEVFRDFRGRRAGMIKALTTDVEKFYQLCDPEKENLCLYGYPNETWEVTLPAEEVPPEIPEPALGINFARDGMNEKDWLALVAVHSDSWLLAVAFYFAARFGFDKEARRRLFSMINNLPTIFEVVTGAAKKQTKEKGPNSTSKSNKPSSKMPSRPESHSKSTKVVAPPKDDDDESGEEYEEEEERDNTLCGSCGTNDGKDEFWICCDSCERWYHGKCVKITPARAEHIKHYKCPDCTNKRARA

SEQ ID NO: 2395 - protein, 258 aa, Setaria italica
MDPGAGAHYSARTAEEVFRDFRGRRAGMIKALTTDVEKFYQLCDPEKENLCLYGYPNETWEVTLPAEEVPPEIPEPALGINFARDGMNEKDWLALVAVHSDSWLLAVAFYFAARFGFDKEARRRLFNMINNLPTIFEVVTGVAKKQTKEKGPNSTSKSNKPSSKMPSRPESHSKATKGSAPPKDDDDDESGEEYEEEEERDNTLCGSCGTNDGKDEFWICCDSCERWYHGKCVKITPARAEHIKHYKCPDCSNKRARA

SEQ ID NO: 2396 - protein, 250 aa, Brachypodium distachyon
MEGAGGGAAYPSRTAEEVFRDLRGRRAGMIKALTEEVEKFYKLCDPEKENLCLYGYPNETWEVTLPAEEVPPEIPEPALGINFARDGMNEKDWLALVAVHSDSWLLAVAFYFGARFGFDRETRRRLFNMVNNLPTIYEVVTGVAKKQAKEKTPNSSSKSNKPTSKVVSAPKDEEDSGDEDGDEVEEEHDNTLCGTCGTNDGKDEFWICCDNCEKWYHGKCVKITPARAEHIKHYRCPECTNGNSNKRLKP

SEQ ID NO: 2397 - protein, 231 aa, Echinochloa colona
RRAGMIKALTTDVDKFFKLCDPEKENLCLYGYPNETWEVTLPAEEVPPEIPEPALGINFARDGMNEKDWLALVAVHSDSWLLSVAFYFGARFGFDKEARRRLFSMINNVPTIFEVVTGSAKKQTKEKTPNSSSKSNKPSSKVQSRAESRSKAKVPKDEEESGDDDGDEEAEEHDNTLCGTCGTNDGKDQFWICCDNCEKWYHGKCVKITPARAEHIKQYKCPDCTNKRARA

SEQ ID NO: 2398 - protein, 263 aa, Secale cereale
  Sequence also found in Organisms: Triticum aestivum
MDGAGAGGAYVARTAEEVFRDLRGRRAGMIKALTEDVDKFFKLCDPEKENLCLYGYPNETWEVTLPAEEVPPEIPEPALGINFARDGMNEKDWLALVAVHSDSWLLSVAFYFGARFGFDKENRRRLFNMINNLPTIYEVVTGIAKKQSKEKTPNSSSKSSKPSMKVLSRAEPRAKAKVPVPKDEEESGEDEGDDEEEEHDNTLCGTCGTNDGKDEFWICCDNCEKWYHGKCVKITPARAEHIKHYRCPECTNGGSNSNKRVKT

SEQ ID NO: 2399 - protein, 263 aa, Hordeum vulgare
MDGAGAGGAYVARTAEEVFRDLRGRRAGMIKALTEDVDKFFKLCDPEKENLCLYGYPNETWEVTLPAEEVPPEIPEPALGINFARDGMNEKDWLALVAVHSDSWLLSVAFYFGARFGFDKDNRRRLFNMINNLPTIYEVVTGIAKKQSKEKTPNSSSKSSKPSMKVLSRAEPRAKAKVPAPKDEEESGEDEGDDEEEEHDNTLCGTCGTNDGKDEFWICCDNCEKWYHGKCVKITPARAEHIKHYRCPECTNGGSNSNKRVKT

SEQ ID NO: 2400 - protein, 257 aa, Cenchrus ciliaris
MDPGAGAHYTARTAEEVFRDFRGRRAGMIKALTTDVEKFYQLCDPEKENLCLYGYPNETWEVTLPAEEVPPEIPEPALGINFARDGMNEKDWLALVAVHSDSWLLAVAFYFAARFGFDKEARRRLFNMINNLPTIFEVVTGAAKKQTKEKGPNSTSKSNKPSSKMPSRPESHSKATKGAAPPKDDDDESGEEYEEEEERDNTLCGSCGTNDGKDEFWICCDSCERWYHGKCVKITPARAEHIKHYKCPDCSNKRARA

SEQ ID NO: 2401 - protein, 257 aa, Pennisetum glaucum
MDPGAGAHYTARTAEEVFRDFRGRRAGMIKALTTDVEKFYQLCDPEKENLCLYGYPNETWEVTLPAEEVPPEIPEPALGINFARDGMNEKDWLALVAVHSDSWLLAVAFYFAARFGFDKEARRRLFNMINNLPTIFEVVTGAAKKQTKEKGPNSTSKSNKPSSKMPSRPESHSKPTKGAAPPKDDDDESGEEYEDEEERDNTLCGSCGTNDGKDEFWICCDSCERWYHGKCVKITPARAEHIKHYKCPDCSNKRARA

SEQ ID NO: 2402 - protein, 256 aa, Panicum virgatum
MDPGAGAHYSARTAEEVFRDFRGRRAGMIKALTTDVEKVYQLCDPEKENLCLYGYPNETWEVTLPAEEVPPEIPEPALGINFARDGMNEKDWLALVAVHSDSWLLAVAFYFAARFGFDKEARRRLFNMINNLPTIFEVVTGAAKKQTKEKGPNSTSKSSKPSSKMPSRPESHSKATKVAAPPKDDDESGEEYEEEEERDNTLCGSCGTNDGKDEFWICCDSCERWYHGKCVKITPARAEHIKHYKCPDCSNKRARA

SEQ ID NO: 2403 - protein, 257 aa, Echinochloa colona
MDPGAGAHYTARTAEEVFRDFRGRRAGMIKALTTDVEKFYQLCDPEKENLCLYGYPNETWEVTLPAEEVPPEIPEPALGINFARDGMNEKDWLALVAVHSDSWLLAVAFYFAARFGFDKEARRRLFNMINNLPTIFEVVTGVAKKQTKEKGPSSTSKSNKPSSKMPSRPESHSKATKVAAPPKDDDDESGEEYEEEEERDNTLCGSCGTNDGKDEFWICCDSCERWYHGKCVKITPARAEHIKHYKCPDCSNKRARA

SEQ ID NO: 2404 - protein, 257 aa, Echinochloa colona
MDPGAGAHYTARTAEEVFRDFRGRRAGMIKALTTDVEKFYQLCDPEKENLCLYGYPNETWEVTLPAEEVPPEIPEPALGINFARDGMNEKDWLALVAVHSDSWLLAVAFYFAARFGFDKEARRRLFNMINNLPTIFEVVTGVAKKQTKEKGPSSTSKSNKPSSKMPSRPESHSKATKVAAPLKDDDDESGEEYEEEEERDNTLCGSCGTNDGKDEFWICCDSCERWYHGKCVKITPARAEHIKHYKCPDCSNKRARA

SEQ ID NO: 2405 - protein, 257 aa, Saccharum officinarum
  Sequence also found in Organisms: Sorghum bicolor
MDPGAGAHYSARTAEEVFRDFRGRRAGMIKALTNDVEKFYQLCDPEKENLCLYGYPNETWEVTLPAEEVPPEIPEPALGINFARDGMNEKDWLALVAVHSDSWLLAVAFYFAARFGFDKEARRRLFNMINNLPTIFEVVTGVAKKQNKEKGPNSTSKSNKPSSKMTSRPESHSKATKVAAPPKDDDDESGEEYEEEEERDNTLCGSCGTNDGKDEFWICCDSCERWYHGKCVKITPARAEHIKHYKCPDCSNKRARA

SEQ ID NO: 2406 - protein, 264 aa, Hordeum vulgare
MDVGAGAGAPYASRTAEEVFRDFRGRRAGMIKALTQEVDKFYQLCDPEKENLCLYGYPNETWEVTLPAEEVPPEIPEPALGINFARDGMNEKDWLALVAVHSDSWLLAVSFYFAARFGFDKEARRRLFNMINNLPTIFEVVTGAAKKQTKEKAPNTNTTHKSNNNKPSMKTLSRPESQSKPPKMAAPPKDEDESGEDYGEEEEEERDNTLCGTCGTNGGKDEFWICCDNCERWYHGKCVKITPARAEHIKHYKCPDCSNKRARV

SEQ ID NO: 2407 - protein, 256 aa, Zea mays
MDPGAGAHYSVRTAEEVFRDFRGRRAGMIKALTNDVEKFYQLCDPEKENLCLYGYPNETWEVTLPAEEVPPEIPEPALGINFARDGMNEKDWLALVAVHSDSWLLAVAFYFAARFGFDKEARRRLFNMINNLPTIFEVVTGVANKQNKEKGPNSTSKSNKTSSKMTSRPESHSKATKVAVPPKDDDDESGEEYEEEERDNTLCGSCGTNDGKDEFWICCDSCERWYHGKCVKITPARAEHIKHYKCPDCNNKRARA

SEQ ID NO: 2408 - protein, 256 aa, Musa acuminata
MEGGGGPHSSRTAEEVFRDFRGRRAGMIKALTTDVEKFYQLCDPEKENLCLYGLPNETWEVTLPAEEVPPELPEPALGINFARDGMEEKDWLALVAVHSDAWLLAVAFYFGARFGFDKESRRRLFNMINNLPTIFEVVTGTAKKLSKEKTSNSSSKNKPNSKTQSRPAESQTRASKMHSPKEDEDSGADEEEEEEEDHENTLCGACGDNYANDEFWICCDMCERWFHGKCVRITPARAEHIKQYKCPSCSNKRARV

SEQ ID NO: 2409 - protein, 256 aa, Zea mays
MDPGAGAHYSARTAEEVFRDFRGRRAGMIKALTNDVEKFYQLCDPEKENLCLYGYPNETWEVTLPAEEVPPEIPEPALGINFARDGMNEKDWLALVAVHSDAWLLAVAFYFAARFGFDKEARRRLFNMINNLPTIFEVATGVAKKQNKEKEPNNTSKSNKPSSKMTTRPESHLKATKVAPPKDEDDESGEEYEEEEERDNTLCGSCGTNDGKDEFWICCDSCERWYHGKCVKITPARAEHIKHYKCPDCSNKRARA

SEQ ID NO: 2410 - protein, 1349 aa, Brachypodium distachyon
MNNFHVYEAIGRGKHSTVYKGRKKKTIEYFAVKSVDKSQRSKVLNEVRMLHSLDHANVLKFYSWYETSAHFWLVLEYCVGGDLKGLLEQDEKLPESAMHDLAYDLVKALLFLHSQGIIYCDLKPSNILLDEFGCMKLCDFGLARRLKDIEKTTPGDVPQPMRGTPCYMAPELFREGGVHSYASDFWALGCVLYECYAGKPPFVGSEFTQLVKSILSDPTPLLPDNPSRSFQNLINCLLMKDPAERLQWSELCEHNFWRSSMPLIPLPPQPAFDKMVGLSSTPYLAERNGDKLSRQLTPPKTREYNGLRKKDENSGQGFTTPVKNVQSSKKNSAKPSCKADGGLKGVNVLRMSRIAKINLQRERDKENYRRGPTDTYENEAEVKIENNDMELDFGENPEGDAPDDNDGSDNTASTADEKQMAQGADGNEENCMINQMDMLTDECSVKPDTVQKTEQNCSEVLDVVATPPSFGMRKARAKITSGAATGSEPLNIFEAFWHPADLAVKPVMPSKKGDKATEVVPVLPFEALPAGDYIKLPREQMNAFNSQIIQSLSGTFQVSEKQNIIRYLEMLSMNSDAANIITNGPIMSLLIKMLRLSKTSVLRVQVASLMGLLIRYSTILDAELASSGIVNALSDGLRDRHDKLRRSCMATLGELLFYISTQSDEDNKESNAQESPLKDNKSAASWQVPSAVIALVSSILRKGEDDLAQLYALRTIDNICSQGTDWTSRFASQDVIGHLCYIYKATGKQENTRLIAVSCLSRLARFSSSCIHLILEKLSFKDMACTLIKGNPREQQTTLNLLNSALVNSHNIANMNRYILSLTEEKQLVPGLISLIEQGTDVLRGKALLFVALLCKNSRRWLPHFFCNAKLLSAVDRLGKEKVGFIHQCMEAFVQLVASLVPGILDTVCSDIQQVMGGKRHGPVTALTGRSHPKSTIHLFPVILHLLGSVSFNHRVVTSHVLLQLANLMKILETPFQARDDFQMTLLRVLEAATEEPSVILKEHKIFTTRFLPSLSILYKGNKDCDARFLCLKILSDVMIVIFSDSSLTADERTVADLKTISHKYFLPMYPSFAEDEDPIPIYAQKLLVMLMEHDCVKVSDILNEATVSQCFEFLLGDLSNANVSNVKLCFALASAPDMDTNILSQLQVVRRIGNLLEFVTAKDMDDFLEPTLELCRAFIIRGIGSNRSIALTKEPALLVDSAFSMSIAVDQQSCIMDICDLGGSMGIFLEVVGNSDPQISDLASDCLVLLLKAAPREATMGLLTNLPKLSTVLDVLKNDACLRLTRLLYGLAFSCRQYLAQGMILSISVPALMRVEALVLAFKGAHDSRLVDAASYLGAELQRLPRCG

SEQ ID NO: 2411 - protein, 1346 aa, Setaria italica
MNNFHVYEAIGRGKHSTVYKGRKKKTIEYFAVKSVDKSQRSKVLNEVRMLHSLDHANVLKFYSWYETSAHFWLVLEYCVGGDLKGLLEQDKKLPESSIHDLAYDLVKALQFLHSQGIIYCDLKPSNILLDEFGCMKLCDFGLARRLKDIEKTNPGDVPQPMKGTPCYMAPELFREGGVHSYASDFWALGCVLYECYTGRPPFVGREFTQLVKSIISDPTPPLPDNPSRSLQNLIDCLLMKDPAERLQWSELCEHNFWRTSIAMIPLPPQPAFDNMIELSATPYLAERNGDKPSRQLTPPKHREHNGLRKKDENSTKGFVTPVKNVQSGKRNSAKPKADGFKGVNILRMSRIAKLNLQREKDKENYRRPPAETSENETEVKIENNDMELDFGENPEGDAPDDTDGSDHPGPAAHEKPQATNGNEENCMANQVDMLTDEGLVKPDIMTKTEQNSCSDNLDVVATPPSICMRKAQRAKVTPCSATGSEPTNIFEAFWHPTDLAVKPVMPSRKADKAVDTVPTLPFEALTACDYIKLPQEQLNAFNSQILQSLSGTFQVSEKQNTIRYLEMLSMNSDAANKITNGPIMLLLIKMLRLSKTAVLRVQIASLMGLLIRYSTALDVELASSGIVNALSDGLRDKHDKLRRFCMATLGELLFYISTQSDQDTKEINTQESPLKDNRPATSWQVPSAVIALVSSILRKGEDDLAQLYALRTIDNICSQGTEWTSRFASQDAIGHLCYIYKATGKQESTRLIAGSCLARLSRFSPSCIHLILEKISFKDIASTLIKGNPREQQISLNILNSALVNSQTVTNMNRYILSLSDDKQLVPGLISLIEQGTDVLRGKALLFVALLCKNSRRWLPHFFCNAKLISAVDRLGKEKEGFIHQCTEAFVQLVASLVPAILDTVCSDIQQVLAGKRHGPVTALAGRAHPKSTIHLFPVILHLLGSASFRHRVMTSHVLLQLANLIKILEAPFQARDDFQMTLLRVLEAATEEPSVILNEHKIFTSRIIPSLSILYKGNKDGDARFLCLKILSDVMIVIFSDSSLTADEQTISDLKLISQKHFLPLYPSFAEDEDPIPIYAQKLLVMLMEHDCVKVCDILHKATVSQCFEFLLGDLSNTNVSNVKLCFALASAPEMDTHILSQLQVVRRIGNLLEFVAAKDMDDFLEPTLELCRAFIIRGIGSNRSAALSQNPALLVDSAFSMSIAVDQQTCVMDICDFGGNMGIFLELVGSSDPQISDLASDCMVLLLKAAPREATVGLLTNLPKLSAVMDLLKHDSSLRLTRLLYGLGFSCRQYLAQGMILSISVSALMRVEALVSAFKGSNDNFLADAASYLGAELQRLPRCG

SEQ ID NO: 2412 - protein, 1344 aa, Aegilops tauschii
MNNFHVYEAIGRGKHSTVYKGRKKKTIEYFAVKSVDKSQRSKVLNEVRMLHSLDHANVLKFYSWYETSAHFWLVLEYCVGGDLKGLLEQDKKLPESAMHDLAYDLVKALLFLHSQGIIYCDLKPSNILLDEFGCMKLCDFGLARRLKDIEKTDPGDVPQPMRGTPCYMAPELFQEGGVHSYASDFWALGCVLYECYVGRPPFVGREFTQLVKSILSEPAPPLPDNSSRSFQNLINCLLMKDPAERLQWSELCAHNFWRNSMPMIPLPPQPAFNNMVGLPTTPYLAERNGDKPSGQLTPPKTREHLRKKDENSAKVFTTPVKNVLTGKKNNAKPCKADGLKGVNVLRMSRIAKKNLQREKDKENYRRPPTETNENEAEVKIENNDMELDFGENPEGDAPDDNDGSDNAGSTADEKHTTEGTDGNEENCINQVDMLTDECSVKPDTMLKAEQNCSENLDVVATPPSFCMRKARPKITSGAATGSEPSNIFEAFWHPTDLAVKPVMPSKKGDKATETVTVLPFEALPAADYIRLPREQMNAFHSQIMQSLSGSFQVSEKQNIIRYLELLSMNSDAANIITNGPIMSLLIKMLRLSKTSVLRVQVASLMGLLIRYSTILDAELASSGIVNALSDGLRDRHDKLRRFCMATLGELLFYISTQSDQDSKESNAQESPMKDNKVSALWQVPSSVIALVSSILRKGEDDLAQLYALRTIDNICSQGTDWTSRFASQDVIGHLCYIYKATGKQENTRLIAISCLSRLARFSSSCTHLILEKLTFKDIACTLLKGNPREQQISLNLLNSALGNSHIIPNMSRYILSLTEEKQLVPGLISLIEQGTDILRGKALLFVALLCKNSRRWLPQFFCNAKLLSAVDRLGKEKDGFIHQCTEAFVQLVASLVPGILDTVSSDIQQVMGGKRHGPITALTGRAHPKSTIHLFPVILHLLGSVSFNHRVVTSQVLLQLANLMKILETPFQARDDFQMTLLRVLEAATEEPSVILREHKIFTSRFLPSLSILYKGNKDCDARFLCLKILSDVMIVIFSDSSLTADEQCLADLKTISHKYFLPMYPSFAEDEDPIPMYAQKLLVMLMEHDCVKVSDILNEATVSQCFEFLLGDLSNANVSNVKLCFALASAPDMDSNILSQLQVVRRIGNLLEFVTAKDMDDFLEPTLELCRAFIIRGTGSNRSIVLSKEPALLVDSAFSMSIAVDQQSCIMDICDLGGSMGIFLEVVGNSDPQISDLASDCVVLLLKAAPREATMGLLTNLPKLSALLDSLKHGVPLPRTRLLYSLAFSCRQYLTQGMILSISVPALMRVEALVSSFKCSQDSCLADAASCVGAELQRLPRCG

SEQ ID NO: 2413 - protein, 1344 aa, Secale cereale
MNNFHVYEAIGRGKHSTVYKGRKKKTIEYFAVKSVDKSQRSKVLNEVRMLHSLDHANVLKFYSWYETSAHFWLVLEYCVGGDLKGLLEQDKKLPESAMHDLAYDLVKALLFLHSQGIIYCDLKPSNILLDEFGCMKLCDFGLARRLKDIEKTDPGDVPQPMRGTPCYMAPELFQEGGVHSYASDFWALGCVLYECYVGRPPFVGREFTQLVKSILSEPAPPLPDNSSRSFQNLINCLLMKDPAERLQWSELCAHNFWRNSMSMIPLPPQPAFDNMVGLPTTPYLAERNGDKPSRQLTPPKTREHLRKKDENSAKAFMTPVKNVLTGKKNNAKPCKADGLKGVNVLRMSRIAKKNLQREKDKENYRRPPAETDENEAEVKIENNDMELDFGENPEGDAPDDNDGSDNAGSTADEKHTTEGTDGNEENCINQVDMLTDECSVKPDTMLKAEQNCSENPDVVATPPSFCMRKARPKITSGAATGSEPPNIFEAFWHPTDLSVKPVMPSKKGDKATETITVLPFEALPAADYIRLPREQMNAFHSQIIQSLSGSFQVSEKQNIIRYLELLSMNSDAANIITNGPIMSLLIKMLRLSKTSVLRVQVASLMGLLIRYSTILDAELASSGIVNALSDGLRDRHDKLRRFCMATLGELLFYISTQSDQDSKESNAQESPMKDNKAGALWQVPSSVIALVSSILRKGEDDLAQLYALRTIDNICSQGTDWTSRFASQDVIGHLCYIYKATGKQENTRLIAISCLSRLARFSSSCTHLILEKLTFKDIACTLLKGNPREQQISLNLLNSALGNSHIIPNMSRYILSLTEEKQLVPGLISLIEQGTDILRGKALLFVALLCKNSRRWLPQFFCNAKLLSAVDRLGKEKDGFIHQCTEAFVQLVASLVPGILDTVSSDIQQVMGGKRHGPVTALTGRAHPKSTIHLFPVILHLLGSVSFNHRVVTSQVLLQLANLMKILETPFQARDDFQMTLLRVLEAATEEPSVILREHKIFTSRFLPSLSILYKGNKDCDARFLCLKILSDVMIVIFSDSSLTADEQCLADLKTISHKYFLPMYPSFAEDEDPIPMYAQKLLVMLMEHDCVTVSDILNEATVSQCFEFLLGDLSNANVSNVKLCFALASAPDMDSNILSQLQVVRRIGNLLEFVTAKDMDDFLEPTLELCRAFIIRGTGSNRSIVLTKEPALLVDSAFSMSIAVDQQSCIMDICDLGGSMGIFLEVVGNSDPQISDLASDCVVLLLKAAPREATMGLLTNLPKLSALLDSLKHGAPLPMTRLLYSLAFSCRQYLTQGMILSISVPALMRVEALVSSFKGSQDSCLADAATCVGAELQRLPRCG

SEQ ID NO: 2414 - protein, 1348 aa, Panicum virgatum
MNNFHVYEAIGRGKHSTVYKGRKKKTIEYFAVKSVDKSQRSKVLNEVRMLHSLDHANVLKFYSWYETSAHFWLILEYCVGGDLKGLLEQDKKLPENSIHDLAYDLIRALQFLHSQGIIYCDLKPSNILLDEFGCMKLCDFGLARRLKDIEKTNPGDVPQPMRGTPCYMAPELFREGGVHSYASDFWALGCVLYECYTGRPPFVGREFTQLVKSIISDPTPPLPDNPSRSLQNLIDCLLMKDPAERLQWSELCEHNFWRTSIPMIPLPLQPAFDNMIELSATPYLAERNGDKPSRQLTPPKHREYIGLGLKKKDENSAKGFTTPVKNLQSGKRNSAKPKADGFKGVNILRMSRIAKLNLQRERDKENYRRPPTETSENETEVKIENNDMELDFGENPEGDVPDDTDGSDHPGSAAHEKPQATDGNEENCMANQVDMLTDEGSVKPDIMMKTEQNSCSDNLDVVATPPSICMRKAQRAKVTPCSANGSEPTNIFEAFWHPTDLAVKPVMPSRKADRAVDTVPTLPFEALTACDYIKLPQEQLNAFNSQILQSLSGTFQVSEKQNTIRYLEMLSMNSDAANKITNGPIMLLLIKMLRLSKTSVLRVQIASLMGLLIRYSTALDVELASSGILNALSDGLRDKNDKLRRFCMATLGELLFYISTKSDQDTKEINNQESPLKDNRPATSWQVPNAVIALVSSILRKGEDDLAQLYALRTIDNICSQGTEWTSRFASQDAIGHLCYIYKATGKQESTRLIAGSCLARLSRFSPSCIHLILEKISFKDIASTLIKGNPREQQISLNILNSALVNSHTVTSMNRYIHSLSDDKQLVPGLISLIEQGTDVLRGKALLFVALLCKNSRRWLPHFFCNAKLISAVDRLGKEKEGFIHKCTEAFVQLVASLVPSILDTVCSDIQQVMTGKRHGPVTALAGRAHPKSTIYLFPVILHLLGSASFRHRVVTSHVLLQLANLIRILEAPFQARDDFQMTLLRILEAATEEPSVVLDEHKIFISRIIPSLSILYKGNKDGDARFLCLKILSDVMIVIFSDSSLTTDEQTISDLKSISLKHFLPLYPSFAEDEDPIPIYAQKLLVMLLEHDCVKVSDILHKATVSQCFEFLLGDLSNANVSNVKLCFALVSAPEMDTRILSQLQVVRRIGNLLEFVAAKDMDDFLEPTLELCRAFIIRGIGSNRSTALSKNPALLVDSAFSMSIAVDQQTCVMDICDFGGNMGIFLEIVGNSDPQISDLASDCVVLLLKAAPREATVGLLTNLPKLSSVMDLLKHDSCLRLTRLLYGLGFSCRQYLAQGMILSISMSALMRVEALVSVFKGSNDNFLADAASYLGAELQRLPRCG

SEQ ID NO: 2415 - protein, 1345 aa, Sorghum bicolor
MNNFHVYEAIGRGKHSTVYKGRKKKTIEYFAVKSVDKSQRSKVLNEVRMLHSLDHANVLKFYSWYETSAHFWLVLEYCVGGDLKGLLEQDKKLPENSIHDLAYDLVKALQFLHSQGIIYCDLKPSNILLDEFGCMKLCDFGLARRLKDIEKTNPGDVPQPMRGTPCYMAPELFREGGVHSYASDFWALGCVLYECYTGRPPFVGREFTQLVKSIISDPTPPLPDNPSRSFQNLIDCLLMKDPAERLQWSELCEHNFWRTSIPMISLPPQPAFDSMIELSTAPYLAERNGDKPSRQLTPPKHREYSGHRKKDENSTKAFMTPVKNVLSGKKNSAKPKAEGFKGVNILRMSRIAKLNLQRERDKENYRRPPTETTENETEVNIENNDMELDFGENPEGDVPDDTDGSDNPGSAGNEKPQSTDANEENCMANQVDMLTDEGSVKPDIMVKTEQNSCSDNMDVAATPPSSMRKAQRAKVAPCPATGSEPSNIFEAFWHPTDLAVKPVMPSRKADKAVDMVPTLPFEALTASDYVKLPQEQMNAFNSQILQSLSGTYQVSEKQNTIRYLEMLSMNSDAANKITNGPVMSLLIKMLRLSKTSVLRVQIASLMGLLIRYSTALDVELASSGIFNALSDGLRDKHDKLRRFCMATLGELLFYISTQSDQDTKEINTQESPLKDNRSATSWQVPSAVIALVSSILRKGEDDLAQLYALRTIDNICSQGTEWTSRFASQDAIGHLCYIYKATGKQESTRLIAGSCLARLSRFSPSCIHLILEKISFKDIASTLIKGNPREQQISLNILNSALVNSHTVTSINRYILSLSDDKQLVPGLISLIEQGTDVLRGKALLFVALLCKNSRRWLPHFFCNAKLISAVDRLGKEKEGFIHQCTEAFVQLVASLVPGILDTVSSDIQQVMAGKRHGPVTALAGRAHPKSTIHLFPVILHLLGSASFKHRVVTCHVLLQLANLIKILEAPFQARDDFQMTLLRVLEAATEEPSVILDEHKIFTSRIIPSLSVLYKGNKDGDARFLCLKILSDVMIVIFSDSSLTSDEQTITDLKSISQRHFLPLYPSFAEDEDPIPIYAQKLLVMLMEHGCVKVSDILHKATVSQCFEFLLGDLSNANVSNVKLCYALASAPEMDTHILSQLQVVRRIGNLLEFVAAKDMDDFLEPTLELCRAFIIRGTGSNRSIALSKNPALLVDSAFSMSIAVDQQTCVMDICDFGGNMGIFLELVGNSDPQISDLASDCVVLLLKAAPREATVGLLTNLPKLSTVMDFLKHDSSLHLIRLLYGLAFSCRQYLAQGMILSISVSALMRVEALVSVFKGSNDSLLSDAAAYLGAELQRLPRCG

SEQ ID NO: 2416 - protein, 1345 aa, Zea mays
MNNFHVYEAIGRGKNSTVYKGRKKKTIEYFAVKSVDKLQSSKVLNEVRMLHSLDHANVLKFYSWYETTVHFWLVLEYCVGGDLKGLLEQDKKLPENSIHDLAYDLVKALQFLHSQGIVYCDLKPSNILLDEFGCMKLCDFGLARRLKDIEKTNPGDVPQPMRGTPCYMAPELFRDGGVHSYASDFWALGCVLYECYTGRPPFVGREFTQLVKSIISDPTPPLPDNPSRSLQNLIDCLLMKDPAERLQWSELCEHNFWRTSILMIPLPPQPAFDNMIELSATPYLAERNGDKPSRQLTPPKHRENIGLRKKDENSTKPSMTPVKNVQSGKKNSAKPKAVGFKGVNILRMSRIAKLNLQRERDKENYRRPPTETTENETEVNIENNDMELDFGENPEGDAPDDTDGSDNPGSAGNENPQSTDANEENYMENQVDMLTDEGSVKPDIMVETEQNSCSDNLDVAASPPSSMRKAHRAKVTPCPATGSEPSNIFEAFWHPTDLAVKPVMPIRKADKAVDMIPTLPFEALTAGDYTKLPKEQMNAFNSQILQSLSGTYQVSQKQNTIRYLEMLSMNSDAANKITNGPIMLLLIKMLRLSKTSVLRVQIASLMGLLIRYSTALDVELASSGIFNALSDGLRDKHDKLRRFCMATLGELLFYISTQSDQDNKEINTQESPLKGNRPATSWQVPSAVIALVSSILRKGEDDLDQLYALRTIDNICSQGTEWTSRFASQDVIGHLCYIYKATGKQESTRLIAGSCLARLSRFSPSCIHLILEKISFRDIASTLIKGNGREQQINLNILNSALVNSHTVTSMNRYILSLSDDKQLVPGLISLIEQGTDVLRGKAFLFVALLCKNSRRWLPHFFCNAKLISAVDRFGKEKEGFIHQCTEAFVQLVASLVPGILETVSSDIQQIMCGKRHGPVTALAGRAHPKSTIHLFPVILRLLGSASFKHRVVTGHVLLQLANLIKILEAPFQARDDFQMTLLRVLEAATEEPSVILDEHTIFTSRIIPSLSVLYKGNKDGDARFLCLKILSDVMIVIFSDSSLTSDEQILTDLKSISQRHFLPLYPSFAEDEDPIPIFAQKLLVMLMEHGYIKVSDILHKATVSQCFDFLLGDLSNANVSNVKLCFALASAPEMNTHILSQLQVVRRIGNLLEFVAAKDMDDFLEPTLEFCRAFIIRGTGSNRSVALSENPALLVDSAFSMSIAVDQQTCVTDICDFGGNMGTFLELVGNSDPQISNLASDCVVLLSKAAPREATVGLLTNLPKLSTAMDLLKHESSLRLIRLLYGLAFSCRQYLAQGMILSISVSALMRVEALVSVFKGSNDSLLADAASYLSAELQRLPRCG

SEQ ID NO: 2417 - protein, 659 aa, Setaria italica
MALQMEPPVPPPRRSVSTTCDLHPGESFTGFCAACLRERLAGLEASAAVAAAPGRKSTSAIRSLFSRPFNAAAAAGGGPSGSAASTLPDLRRCKSFSCGRGGDALAAAVAGAGGAYEPQRRSCDVRGRSTLWALFHQDDRERVRDGTAFGAFPASSSAAAAALAAEVLPPPQPPPPPPACVPEVFLEEEIAVAEDSDEIVPVVEPVLVVDTSGEMETEAYAAVRDVRAMKDHIDLESSQSQQPKKPPPKDLKEIAGSFWLAASVFSKKWQKWRRKQKIKKQEAAGSKAAAAAMPPPEKPSKPSFLRRSRFHRGGAGSEFAGGRRSCDTDPRFSVDAGRMSVDDVGFSWDEPRASWDGYLFGAGTGIGLGRAPPPVSRLPPILSALEDSPAGIVERSDGQIPVEDDSQPEPDADANIPGGSAQTRDYYMDTSSRRRRSLDRSSSVRRSFEVTDPKPVPVPVPVPVPVAAPAATANGKESPLMGSSEFYHFQHAEDLLDHHRFSTSSLVEDFSASLDGAFHGPAKKPRRWSKAWSLWGLIHRRAAGRRSAASDAADRAFSEPWPELRVRGYNGRMQRCNSNASARSSFSSNSGGLGSSRHSYVDPQGNVKRRREECAALERNRSARHSPGHADNGMLRFYLTPMRSASGRRTAVLPAAAGS

SEQ ID NO: 2418 - protein, 660 aa, Zea mays
MTLQMEPPVPPPRRSVSTTCDLHPGETFTGFCAACLRERLAGLESTGGSAAAAAPGRRSTSAIRSLFTRPFAAAAGGAPSGSGAAALPDLRRCKSFSCGRGGDALAAAGEPQRRSCDVRGRSTLWALFHQDDRQRVRDGTAFGAFPASSSAAAAALAAEVLPPPQPPPPACVPEMFSEEEIAVAEDSDEIVAVMEPVSVVGTSGEMETEVSAARDVRAMKDHIDLEASQSQQPRKLPPKDLKEMAGSFWLAASMFSKKWQKWRGKQKLKKQEAAGSKAAAAAMPPPEKPSKPSFLRRSRFRRGEAGSEFAGGRRSCDTDPRFSLDAGRMSVGDMGFSWDEPRASWDGYLFGAGTGIGLGRAPPLSRLPPILSAMEDSPAGILERSDGQIPVEDDSQPEPDHDANVPGGSAQTRDYYMDTSSRRRRSLDRSSSVRRSFEVTDPKPVPVPVPVPVPVTAPAAIVNGKESPAMGSSEFYHFHHAEDLFDHRFSTNSLVEDFSASLDAAFHGPAKKPPRWRKAWSLWGLIHRRAAGRRDGASDAADRAFSEPWPDLRVRGYNGRMQRCNSNASARSSFSSNSGGLGSSRRSYLDAHGKRRREECAALERNRSARHSPGNADNGLLRFYLTPIRSASGRRTGVLPVKGGRQLRSQSFARTMLGLY

SEQ ID NO: 2419 - protein, 609 aa, Panicum virgatum
MKFMKLGSNPDTFQGDGNEVSIVASELVSDITVRIGTTKFYLHKFPLLSKCSRFQKLIPTTGDENIDIHIHDIPGGAKAFEICAKFCYGMIVTLNAYNVIAARCAAEYLEMNETVDKGNLIYKIDVFLSSSILRSWKDSIIVLGTTKAHLPWAEDLKLVSHCIDSVASKASIDVSKVEWSYTYNRKKLPTENGNDSPWNGVKQQQLVPKDWWVEDLTDLDIDAYKQVITAIKAKGMVPKDVIGEAIKAYTYKKLPSLSKVSMIHGDAKVRAMLVTITCLLPSEKGSVSCSFLLKLLKATNLLKCGEMCRKELMKRIARQLEEASVSDLLIPTVDGDTTVYDIDLILSIVEEFVRQDCKNAQKHNGGEVNDHVSAPSASMITVAKIVDGYLAEVAKDPNIPVYKFFSLAEMVSGNSRPVHDGLYRAIDMYLKEHPGLGKSDKKRLCALMDCKKLSPDACAHAVQNERLPLRIVVQVLYHEQTRASAAATIRADSIGIGSYESSRSGATTNTEDEWDGVMAVEDLSLSKTTKLDKCDTAGTDAEKNHGGKKAANGRVKGGATPKKALGKMMSSKGQAGERSSSDSSDSAILPSQEHPKRTPARSTTKSAAA

SEQ ID NO: 2420 - protein, 609 aa, Setaria italica
MKFMKLGSNPDTFQGDGNEVSIVASELVSDITVRIGTTKFYLHKFPLLSKCARFQKLIPTTGDENIDIQIHDIPGGAKAFEICAKFCYGMIVTLNAYNVIAARCAAEYLEMNETVDKGNLIYKIDVFLSSSIFRSWKDSIIVLGTTKAHLPWAEDLKLVSHCIDSVASKASIDVSKVEWSYTYNRKKLPTESGNDSPWNGVKQQQLVPKDWWVEDLTDLDIDAYKQVITAIKAKCMVSKDVIGEAIKAYTYKKLPSLSKVSMIHGDAKVRAMLVTITCLLPSEKGSVSCSFLLKLLKATNLLKCGEMCRKELMKRIARQLEEASVSDLLIPTVDGDTTVYDIDLILSIVEEFVRQDSKHAQKHNGGEVNDHVSAPSASMITVAKIVDGYLAEVAKDPNIPVYKFFSLAETVSGNSRPVHDGLYRAIDMYLKEHPSLGKSDKKRLCALMDCKKLSPDACAHAVQNERLPLRIVVQVLYHEQTRASAAATIRADSIGIGSYESSRSGATTNTEDEWDGVMAVEDLSLSKTTKLDKCDTAGTDAEKNHGGNKAANGRAKGGATPKKALGKMMSSKGQAGERSSSDSSDSAILPRQEHPKRTPARSTTKSAAA

SEQ ID NO: 2421 - protein, 610 aa, Panicum virgatum
MKFMKLGLNPDTFQGDGNEVSIVASELVSDITVRIGTTKFYLHKFPLLSKCARFQKLIPTTGDENIDIHIHDIPGGAKAFEICAKFCYGMIVTLNAYNVIAARCAAEYLEMNETVDKGNLIYKIDVFLSSSIFRSWKDSIIVLGTTKAHLPWAEDLKLVSHCIDSVASKASIDVSKVEWSYTYNRKKLPTENGNDSPWNGVKQQQLVPKDWWVEDLTDLDIDAYKQVITAIKAKGMVPKHVIGEAIKAYTYKKLPSLSKVSMIHGDAKVRAMLVTITCLLPCEKGSVSCSFLLKLLKATNLLKCGEMCRKELMKRIARQLEEASVSDLLIPTVDGDTTVYDIDLILSIVEEFVRQDCKNAQKHNGGEVNDHVSAPSASMITVAKIVDGYLAEVAKDPNIPVYKFFSLAEMVSGNSRPVHDGLYRAIDMYLKEHPGLGKSDKKRLCALMDCKKLSPDACAHAVQNERLPLRVVVQVLYHEQTRASAAATIRADSIGIGSYESSRSGATTNTEDEWDGVMAVEDLSLSKTTKLDKCDTAVTDAEKNHGGNKTANGRVKGGVTPKKAALGKMMSSKGQAGERSSSDSSDSAILPSQEHPKRTPARSTTKSAAA

SEQ ID NO: 2422 - protein, 609 aa, Pennisetum glaucum
MKFMKLGSNPDTFQGDGNEVSIVASELVSDITVRIGTTKFYLHKFPLLSKCARFQKLIPTTGDENIDIHIHDIPGGAKAFEICAKFCYGMIVTLNAYNVIAARCAAEYLEMNETVDKGNLIYKIDVFLNSSIFRSWKDSIIVLGTTKAHLPWAEDLKLVSRCIDSVASKATIDVSKVEWSYTYNRKKLPTESGNDSPWNGVKQQQLVPKDWWVEDLTDLDIDAYKQVITAIKAKGMVSKDVIGEAIKAYTYKKLPSLSKVSMIHGDAKVRAMLVTITCLLPSEKGSVSCSFLLKLLKATNLLKCGEMCRKELMKRIARQLEEASVSDLLIPTVDGDTTVYDIDLILSIVEEFVRQDSKHAQKHNGGEMNDHVSVPSASMITVAKIVDGYLAEVAKDPNIPVYKFFSLAETVSGNSRPVHDGLYRAIDMYLKEHPNLGKSDKKRLCALMDCKKLSPDACAHAVQNERLPLRIVVQVLYHEQTRASAAATSIRADSIGIGSYESSRSGATTNTEDEWDGVMAVEDLSLSKTTKLDKCDTAGTDAEKNHGGSKAANGRAKGGATPKALGKMMSSKGQAGERSSSDSSDSAILPRQEHPKRTPARSTTKSAAA

SEQ ID NO: 2423 - protein, 613 aa, Zea mays
MKFMKLGSNPDTFQDDGNEVSIAASELVSDITVRIGTTKFYLHKFPLLSKCARFQKLIPTTGDENIEIHIHDIPGGAKAFGVCAKFCYGMIVTLNAYNVIAARCAAEYLEMNETVDKGNLIYKIDVFLSSSIFRSWKDSIIVLGTTKAHLPWAEDLKLVSQCIDSVASKASIDVSKVEWSYTYNRKKLPTENGHDSPWNGVNQRQVVPKDWWVEDLTDLDIDAYKQVITAVKTKGMVAKDVIGEAIKAYTYKKLPSLSKVSMIHGDAKVRAMLVTITCLLPSEKGSVSCSFLLKLLKATNLLKCGDMCRKELMKRIARQLEEASVSDLLIPAVDEDTSVYDIDLILSIVEEFIRQDSKNAQRHNGGEVNDHVSAPSASMITVAKIVDGYLAEVAKDPNIPVYKFFSLAETVSANSRPVHDGLYRAIDMYLKEHPSLGKSDKKRLCALMDCRKLSPDACAHAVQNERLPLRVVVQVLYHEQTRASAAATVRADSIGIGSYESSRSGATTNTEDEWDGVMAVEDLSLSSKTTKLEKCDAASTVSEKNHGGNKGANGRAKGGVMPKKAVGRTTMSGNKGQAGERSSSDSSDSAILPCQLEHPKRAAARSTTKSAAV

SEQ ID NO: 2424 - protein, 624 aa, Zea mays
MKFMKLGSNPDTFQGDGNEVSIAASELVSDITVRIGTTKFYLHKFPLLSKCARFQKLIPTTGDENIEIHIHDIPGGAKAFEICAKFCYGMIVTLNAYNVIAARCAAEYLEMNETVDKGNLIYKIDIFLSSSIHRSWKDSIIVLGTTKAHLPWAEDLKLVSHCIDSVASKASIDVSKVEWSYTYNRKKLTVENGHDSPWNGVKQQQFVPKDWWVEDLTDLDIDAYKQVITAVKTKGTVPKDVIGAAIKAYTYKKLPSLSKVSMIHGDAKVRAMLVTITCLLPSEKGSVSCSFLLKLLKATNLLKCGEMCRKELMKRIARQLEEASVSDLLIPTVDGDTTVYDIDLILSIVEEFVRQDSKNAQRHNGGEVNDHVSAPSASMVAVAKTVDGYLAEVARDPNIPVYKFFSLAETVSAGSRPVHDGLYRAIDMYLKEHPSLGKSDKKRLCALMDCKKLSPDACAHAVQNERLPLRIVVQVLYHEQTRACAAATAIRADSIGIGSYESSRSGATTNTEDEWDGVMAVEDLSLSKTTKLVDKCDTAASTVVVGKDKDHGGNKGATGRVAKGGAGAATPKKALGKTVSGKGQTGERSSSDSSDSAVAVAVLTSQEHPKRTTRARNAAKSAAA

SEQ ID NO: 2425 - protein, 606 aa, Hordeum vulgare
MKFMKLGSNPDTFQDDGGEVRIVESELVSDITVRLGNTKFYLHKFPLLSKCARFQKLIPTTGDENIDIHIHDIPGGSKAFEICAKFCYGMVVTLNAYNVVAARCAAEYLEMNETVDKGNLIYKIDVFLSSSIFRSWKDSIIVLGTTKAHLPWSEDLKLVSHCIDSIASKASVDTSKVEWSYTYNRKKLPTETDLDMQWNGVKKQPSVPKDWWVEDLTDLDIDSYKQVISAIKTMGMVPKDAVGEAIKAYTYKKLPSLSKVSMIHGDAKVRAMLVTITCLLPSEKGSVSCSFLLKLLRATNLLKCGEMCRKELVKRIGRQLDEASVSDLLIPTVDGETTVYDVDMILSIVEEYVKQDSKNAQKHNAEVNGHVQAPSASMITVAKVVDGYLTEVAKDPNTPVLKFINLAEAISGNSRPFHDGLYRAIDMYLKEHPSLSKSDKKKLCCLMDCKKLSPDACAHAVQNERLPLRTVVQVLYHEQTRASAAATVRADSICIGSYESSRSGATTNTEDEWDGVIAVEDLSLSSKTTKLEKCHSTEKSHGSSKSTANGKAKGGATPKKVLGKMLSSKALTGERSSSDSSDSAILRSQDHPKRTPSRSTKPSAAA

SEQ ID NO: 2426 - protein, 605 aa, Brachypodium distachyon
MKFMKLGSNPDTFQDDGSEVSIVESELVSDITVRIGSTKFYLHKFPLLSKCARFQKLIPTTGDENIEVPIHDIPGGPKAFEICAKFCYGIVVTLNAYNVIASRCAAEYLEMNENVDKGNLIYKIEVFLSSSIFRSWKDSIIVLGTTKAHLPWSEDLKLVSHCIDSIASKASADTSKVEWSYTYNRKKLPTENDLDLQWNGVKKQQSVPKDWWVEDLTDLDIDSYKQIITAIKTKGMVPKDVIGEAIKAYTYKKLPSLSKVSMIHGDAKVRAMLVTITCLLPSEKGSVSCSFLLKLLRAANLLKCGEMCRKELVKRIGRQLDEATVSDLLIPTVDGETTVYDIDMILSIVEEYVRQDSKNAQKHNAAEVSGHIQAPSASMNTVTKVIDGYLTEVAKDPNTPVLKFINLAEAVSGNSRLIHDGLYRAIDMYLKEHPNVSKSDKKKLCSLMDCKKLSPDACAHAVQNERLPLRTVVQVLYHEQTRASAAATIRAESICIGSYESSRSGATTNTEDEWDGVMAVEDLSLSKTTKVHTAGTNAEKSHGSNRSTSSKVKGAATPKKALGKMLSSKGLTGERSSSDSSDSAILQRQEHPKRTPSRSTKPAAA

SEQ ID NO: 2427 - protein, 605 aa, Secale cereale
MKFMKLGSNPDTFQDDGSEVRIVETELVSDITVRLGNTKFYLHKFPLLSKCARFQKLIPTTGDENIDIHIHDIPGGPKAFEICAKFCYGMVVTLNAYNVVAARCAAEYLEMNETVDKGNLIYKIDVFLSSSIFRSWKDSIIVLGTTKAHLPWSEDLKLVSHCIDSIASKASVDTSKVEWSYTYNRKKLSTENDLDMQWNGVKKQPSVPKDWWVEDLTDLDIDSYKQVISAIKTMGMVPKDAVGEAIKAYTYKKLPSLSKVSMIHGDGKVRAMLVTITCLLPSEKGSVSCSFLLKLLRATNLLKCGEMCRKELVKRIGRQLDEASVSDLLIPTVDGETTVYDIDMILSIVEEYVRQDSKNAQKHNAEVNGHVQTPSASMITVAKVVDGYLTEVAKDPNTPVLKFINLAEAISGNSRPFHDGLYRAIDMYMKEHPSLSKSDKKKLCCLMDCKKLSPEACTHAVQNERLPLRTVVQVLYHEQTRASAAATVRADSICIGSYESSRSGATTNTEDEWDGVIAVEDLSLSSKTTKLEKCHSAEKSHGSSKSTTNGKAKGGATPKKVLGKMLSSKALTGERSSSDSSDSAILRSQDHPKRTPSRSTKPAAA

SEQ ID NO: 2428 - protein, 606 aa, Triticum aestivum
MKFMKLGSNPDTFQDDGSEVRIVETELVSDITVRLGNTKFYLHKFPLLSKCARFQKLIPTTGDENIDIHIHDIPGGPKAFEICAKFCYGMVVTLNAYNVVAARCAAEYLEMNETVDKGNLIYKIDVFLSSSIFRSWKDSIIVLGTTKAHLPWSEDLKLVSHCIDSIASKASVDTSKVEWSYTYNRKKLSTENDLDMQWNGVKKQPSVPKDWWVEDLTDLDIDSYKQVISAIKTMGMVPKDAVGEAIKAYTYKKLPSLSKVSMIHGDGKVRAMLVTITCLLPSEKGSVSCSFLLKLLRATNLLKCGEMCRKELVKRIGRQLDEASVSDLLIPTVDGETTGYDIDMILSIVEEYVRQDNKNAQKHNAEVNGHVQAPSASMITVAKVVDGYLTEVAKDPNTPVLKFINLAEAISGNSRPFHDGIYRAIDMYMKEHPSLSKSDKKKLCCLMDCKKLSPEACAHAVQNERLPLRTVVQVLYHEQTRASAAATVRADSICIGSYESSRSGATTNTEDEWDGVIAVEDLSLSSKTTKLEKCHSAEKSHGSSKSTTNGKAKGGATPKKVLGKMLSSKALTGERSSSDSSDSAILRSQDHPKRTPSRSTKPSAAA

SEQ ID NO: 2429 - protein, 605 aa, Oryza sativa
MKFMKLGSNPDTFQDDGNEVSIVATELVSDVTVRIGTTKFYLHKFPLLSKCARFQKMIPTTGDENIEIHIHDIPGGAKAFEICAKFCYGMIVTLNAYNVIAARCAAEYLEMHETVDKGNLIYKIEVFLSSSIFRSWKDSIIVLGTTKAHLPWSEDLKLVSHCIDSIASKASTDTSKVEWSYSYNRKKLPTENGLDLEWNGVKKQQFVPHDWWVEDLADLDIDSYKQVITAIKTKGMVPKDVIGEAIKAYTYKKLPSLSKVSMVHGDAKVRAMLVTITCLLPSEKGSVSCSFLLKLLKATNLLKCGELCRKELMKRIGRQLDEASVSDLLIPTVDGETTVYDIDMILSIVEEFVRQDSKNAQKHNGGEVDSHVQAPSASMIKVAKVVDGYLAEVAKDPNTPILKFIHLAETMSINSRPVHDGLYRAIDMYLKEHPSLGKNEKKKLCSLMDCKKLSPDACAHAVQNERLPLRTVVQVLYHEQTRASAAVTIRADSICVGSYESSRSGATTNTEDEWDGVMVVEDLSLSTKTTTKLDGAANSHCSNGKAKKGGASTPKKAAHRRTTTVPTGKGQSGERSSSDSSDSAILQKLELPKRTPSRSTKPAAV

SEQ ID NO: 2430 - protein, 606 aa, Aegilops tauschii
MKFMKLGSNPDTFQDDGSEVRIVETELVSDITVRLGNTKFYLHKFPLLSKCARFQKLIPTTGDENIDIHIHDIPGGPKAFEICAKFCYGMVVTLNAYNVVAARCAAEYLEMNETVDKGNLIYKIDVFLSSSIFRSWKDSIIVLGTTKAHLPWSEDLKLVSHCIDSIASKASVDTSKVEWSYTYNRKKLSTENDLDMQWNGVKKQPSVPKDWWVEDLTDLDIDSYKQVISAIKTMGMVPKDAVGEAIKAYTYKKLPSLSKVSMIHGDGKVRAMLVTITCLLPSEKGSVSCSFLLKLLRATNLLKCGEMCRKELVKRIGRQLDEASVSDLLIPTVDGETTGYDIDMILSIVEEYVRQDNKNTQKHNAEVNGHVQAPSTSMITVAKVIDGYLTEVAKDPNTPVLKFINLAEAISGNSRPFHDGLYRAIDMYMKEHPSLSKSDKKKLCCLMDCKKLSPEACAHAVQNERLPLRTVVQVLYHEQTRASAAATVRADSICIGSYESSRSGATTNTEDEWDGVIGVEDLSLSSKTTKLEKCHNAEKSHGSSKSTANGKAKGGATPKKVLGKMLSSKALTGERSSSDSSDSAILRSQDHPKRTPSRSTKPSAAA

SEQ ID NO: 2431 - protein, 405 aa, Cajanus cajan
MVLEATMICIDNSEWMRNGDYSPARFQAQADAVNLICGAKTQSNPENTVGVLTMAGKGVRVLVTPTSDLGKILACMHGLEIGGEMNLAAGIQVAQLALKHRQNKKQQQRIIVFAGSPVKHEKKMLEMIGRKLKKNSVALDIVNFGEEDEGKTEKLEALLAAVNNNDTSHIVHVPSGPNALSDVLISTPIFTGDGEGGSGFAAAAAAAAAGGVSGFEFGVDPNLDPELALALRVSMEEERARQEAAAKKAAEDAAKQEKGGEQPASSQDATMTERASAATSEAENKTTDLMDDENALLQQALAMSMDDPAISHDVKDTDMSEASASDPELALALQMSIADSTKDQASQSDMSKLLADQSFVSSILASLPGVDPNDPSVKDLLASMQNQSEPQQKNDDKPSNEEEKK

SEQ ID NO: 2432 - protein, 405 aa, Phaseolus vulgaris
MVLEATMICIDNSEWMRNGDYTPSRFQAQADAVNLICGAKTQSNPENTVGVLTMAGKGVRVLVTPTSDLGKILACMHGLETGGEMNLAAGIQVAQLALKHRQNKKQQQRIIVFAGSPIKHEKKMLEMIGRKLKKNSVALDIVNFGEEDEGKSEKLEALLAAVNNNDTSHIVHVPSGPNALSDVLISTPIFTGDGEGGSGFAAAAAAAAAGGVSGFEFGVDPNLDPELALALRVSMEEERARQEAAAKKAAEDAAKQEKGGEQQASSQDATMSERASASTSEAENKTSVLMDDENALLQQALAMSMDDPAISHDVKDTDMSEASASDPELALALQLSIADSAKDQASQSDMGKLLADQSFVSSILASLPGVDPNDPSVKDLLASMQNQSEPQQKNDEKPSEEEEKK

SEQ ID NO: 2433 - protein, 405 aa, Vigna unguiculata
MVLEATMICIDNSEWMRNGDYAPSRFQAQADAVNLICGAKTQSNPENTVGVLTMAGKGVRVLVTPTSDLGKILACMHGLETGGEMNLAAGIQVAQLALKHRQNKKQQQRIIVFAGSPIKHEKKMLEMIGRKLKKNSVALDIVNFGEEDEGKSEKLEALLAAVNNNDTSHIVHVPSGPNALSDVLISTPIFTGDGEGGSGFAAAAAAAAAGGVSGFEFGVDPNLDPELALALRVSMEEERARQEAAAKKAAEDASNQEKGGEQQASSQDATMTDHASAAMSNAENITRDMMDDENALLQQALAMSMDDPAISHDVKDTDMSEASASDPELALALQLSIADSAKDQASQSDMSKLLADQSFVSSILASLPGVDPNDPSVKDLLASMQNQSEPQQKNDDKPSEEEEKK

SEQ ID NO: 2434 - protein, 405 aa, Cajanus cajan
MVLEATMICIDNSEWMRNGDYSPSRFQAQADAVNLICGAKTQSNPENTVGVLTMAGKGVRVLVTPTSDLGKILACMHGLEIGGEMNLAAGIQVAQLALKHRQNKKQQQRIIVFAGSPVKHEKKMLEMIGRKLKKNSVALDIVNFGEEDEGKTEKLEALLAAVNNNDTSHIVHVPSGPNALSDVLISTPIFTGDGEGGSGFAAAAAAAAAGGVSGFEFGVDPNLDPELALALRVSMEEERARQEAAAKKAAEDASKQEKGGEQQASPQDTTMTERASASTSEAETKKTDLTDDENALLQQALAMSMDDPAISHDVRDTDMSEATADDPELALALQLSVEDGTKDSASQSDVSKLLADQSFVSSILASLPGVDPNDPSVKDLLASMQNQSEPQQKNEDKPPNEEEKK

SEQ ID NO: 2435 - protein, 405 aa, Vigna unguiculata
MVLEATMICIDNSEWMRNGDYAPSRFQAQADAVNLICGAKTQSNPENTVGVLTMAGKGVRVLVTPTSDLGKILACMHGLEIGGEMNLAAGIQVAQLALKHRQNKKQQQRIIVFAGSPVKHEKKMLEMIGRKLKKNSVALDIVNFGEEDEGKNEKLEALLSAVNNNDTSHIVHVPSGPNALSDVLISTPIFTGDGEGGSGFAAAAAAAAAGGVSGFEFGVDPNLDPELALALRVSMEEERARQEAAAKKAAEDASKQEKGDEQKASPQDTTMTEGASAGASEANNKKTDLTDDENALLQQALAMSMDDPAISHDVRDTDMSEAAADDPELALALQLSVEDSSKDSASQSDVSKLLADQSFVSSILASLPGVDPNDPSVKDLLASMQNQSEPQQKNEDKPPNEEEKK

SEQ ID NO: 2436 - protein, 402 aa, Phaseolus vulgaris
MVLEATMICIDNSEWMRNGDYAPSRFQAQADAVNLICGAKTQSNPENTVGVLTMAGKGVRVLVTPTSDLGKILACMHGLEIGGEMNLAAGIQVAQLALKHRQNKKQQQRIIVFAGSPVKHEKKMLEMIGRKLKKNSVALDIVNFGEEDEGKNEKLEALLSAVNNNDTSHIVHVPSGPNALSDVLISTPIFTGDGEGGSGFAAAAAAGGVSGFEFGVDPNLDPELALALRVSMEEERARQEAAAKKAAEDTSKQEKGDEQKASPQDTTMTEGASAATSEANNKKTDLTDDENALLQQALAMSMDDPAISHDVRDTDMSEAAADDPELALALQLSVEDSSKDSTSQSDVSKLLADQSFVSSILASLPGVDPNDPSVKDLLASMQNQSEPQQKNEDKPPNEEEKK

SEQ ID NO: 2437 - protein, 404 aa, Lupinus angustifolius
MVLEATMICIDNSEWMRNGDYSPSRFQAQADAVNLICGAKTQSNPENTVGVLTMSGKGVRVLVTPTSDLGKILACMHGLEIGGEMNLAAGIQVAQLALKHRQNKKQQQRIIVFAGGPVKHEKKMLEMIGRKLKKNSVALDIINFGEEDEEKTEKLEALLAAVNNNDTSHIVHVPAGPNALPDVLISTPIFTGDGEGGSGFAAAAAAAGGVSGYEFGVDPNLDPELALALRVSMEEERARQEAAAKKAAEDAAKQEKGGEQQASSQDATMTERASAATSDAENKTNDLMDDENALLEQALAMSMDDPATSHDVKDTDMSEAASVDPELALALQLSVADSTKDATSQSDMSKLLADESFVSSILASLPGVDPNDPSVRDLLASMQNQSEPQQKDDEKPSSNEEEKK

SEQ ID NO: 2438 - protein, 403 aa, Lotus japonicus
MVLEATMICIDNSEWMRNGDYNPSRFQAQADAVNLICGAKTQSNPENTVGVLTMAGKGVRVLVTPTSDLGKILACMHGLEIGGEMNLAAGIQVAQLALKHRQNKKQQQRIVVFAGSPVKHEKKMLEMIGRKLKKNSVALDIINFGEEDEGKTEKLEALLAAVNNNDSSHIVSVPPGPNALSDVLISTPIFTGDGEGGSGFAAAAAAAAAGGVSGYEFGVDPNLDPELALALRVSMEEERARQEAAAKKAAEEAANQEKGGETSSQDATMTERASAATSEAENKTIDLMDDENALLQQALAMSMDDPVSSHDVKDTDMSEAPADDPDLALALQLSVADGTKDSGSQSSDMSKLLADQSFVSSILASLPGVDPNDPSVKDLLASMQNQSEPEKKNDDKPSDEEKK

SEQ ID NO: 2439 - protein, 406 aa, Arachis hypogaea
MVLEATMICIDNSEWMRNGDYSPSRFQAQADAVNLICGAKTQSNPENTVGVLTMAGKGVRVLVTPTSDLGKILACMHGLEIGGDMNLAAGIQVAQLALKHRQNKKQQQRIIVFAGSPVKHEKKVLEMIGRKLKKNSVALDIVNFGEEDEGKTEKLEALLAAVNNNDTSHIVHVPAGTNALSDVLISTPIFTGNGEGGSGFAAAAAAAAAGGVSGFEFGVDPNLDPELALALRVSMEEERARQEAAAKKAAEEASKQEKGGEQQASSQDATMTERASASASEAETKTNDMMDDENALLQQALAMSMDDPAINQEAKDTDMSEAASDDPELALALQLSVADSSKDSSSQSDMSKLLADQSFVSSILASLPGVDPNDPSVKDLLASMQNQSESQQKNDDKKPPSEEEKK

SEQ ID NO: 2440 - protein, 405 aa, Glycine max
MVLEATMICIDNSEWMRNGDYSPSRFQAQTDAVNLICGAKTQSNPENTVGVLTMAGKGVRVLVTPTSDLGKILACMHGLEIGGEMNLAAGIQVAQLALKHRQNKKQQQRIIVFAGGPVKHEKKMLEMIGRKLKKNSVALDIVNFGEEDEGKTEKLEALLSAVNNNDTSHIVHVPSGPNALSDVLISTPIFTGDGEGGSGFAAAAAAAAAGGVSGFEFGVDPNLDPELALALRVSMEEERARQEAAAKKASEDASKQEKDGEQQASPQDTTMTEGASAAASEAETKRTDLTDDENALLQQALAMSMDDPTINHEVRDTDMSEAAAEDPELALALQLSVEDSSKDSASQSDVSKLLADQSFVSSILASLPGVDPNDPSVKDLLASMQNQSEPQQKNEDKPPNEEEKK

SEQ ID NO: 2441 - protein, 401 aa, Trifolium pratense
MVLEATMICIDNSEWMRNGDYSPSRFQAQADAVNLICGAKTQSNPENTVGVLIMAGKGVRVLVTPTSDLGKILACMHGLEVGGEMNLAAGIQAAQLALKHRQNKKQQQRIIVFAGSPVKHEKKMLEMIGRKLKKNSVALDIVNFGEEDEEKTEKLESLLAAVNNNDTSHIVHVPAGPNALSDVLISTPIFTGDGEGGSGFAAAAAAAAAGGVSGYDFGVDPNLDPELALALRVSMEEERARQEAAAKKAAEDASKQEKGGEQQAGSQDATMTDRAGASTSEAENKTTDLMDDENALLQQALAMSMDEPAVGHDVKDTDMSEASIDDPELALALQLSVADSTKDQASQSEVLADQSAVSDILASLPGVDLNDPSIKDLLASMQNKSEPQQKNDDKSSNDEKK

SEQ ID NO: 2442 - protein, 406 aa, Trifolium pratense
MVLEATMICIDNSEWMRNGDYSPSRFQAQADAVNLICGAKTQSNPENTVGVLIMAGKGVRVLVTPTSDLGKILACMHGLDVGGEMNLAAGIQVAQLALKHRQNKKQQQRIIVFAGSPVKHEKKMLEMIGRKLKKNSVALDIVNFGEEDEEKTEKLESLLAAVNNNDTSHIVHVPAGPNALSDVLISTPIFTGDGEGGSGFAAAAAAAAAGGVSGYDFGVDPNLDPELALALRVSMEEERARQEAAAKKAAEDASKQEKGGEQQAGSQEASSQDATMTDRAGASTSEAENKTTDLMDDENALLQQALAMSMDEPAVGHDVKDTDMSEASIDDPELALALQLSVADSTKDQASQSEVLADQSAVSDILASLPGVDLNDPSIKDLLASMQNKSEPQQKNDDKSSNDEKK

SEQ ID NO: 2443 - protein, 402 aa, Trigonella foenum-graecum
MVLEATMICIDNSEWMRNGDYSPSRFQAQADAVNLICGAKTQSNPENTVGVLIMAGKGVRVLVTPTSDLGKILACMHGLEIGGEMNLAAGIQVAQLALKHRQNKKQQQRIIVFAGSHVKHEKKMLEMIGRKLKKNSVALDVVNFGEEDEAKTEKLESLVAAVNNNDTSHIVHVPAGPNALSDVLISTPIFTGDGEGGSGFAAAAAAAAAGGASGYDFGVDPNLDPELALALRVSMEEERARQEAAAKKAAEDAAKQEKGGEQQASSQDATMTDRASASTSEAENKTTDLMDDENALLQQALAMSMDDPAVGHDARDTDMTEASADDPDLALALQLSVADSTKDEASQSDVTRLLADQSRVSDILASLPGVDINDPSIRDLLASIPNQSEQKNDDKPSNEEKK

SEQ ID NO: 2444 - protein, 406 aa, Cicer arietinum
MVLEATMICIDNSEWMRNGDYSPSRFQAQADAVNLICGAKTQSNPENTVGVLTMAGKSVRVLVTPTSDLGKILACMHGLEIGGEMNLAAGIQVAQLALKHRQNKKQQQRIIVLAGSPIKHEKKTLEMIGRKLKKNSVALDIINFGEEDESKTEKLESLLAAVNNNDTSHIVHVPAGPNALSDVLISTPIFTGDGEGGSGFAAAAAAAAAGGVSGYDFGVDPNLDPELALALRVSMEEERARQEAAAKKAAEDAAKQEKGGEQAGSQEASSQDATMTERASVSTSEAENKTTDFMDDDSALLQQALAMSMDDPAVGHNVKDSDMSEASPDDPELALALQLSVADSTKDNASQSDASKLLADQSFVSSVLASLPGVDPNDPSVKDLLASMQNQSEPKNDDKPSNEEKK

SEQ ID NO: 2445 - protein, 406 aa, Trifolium pratense
MVLEATMICIDNSEWMRNGDYSPSRFQAQADAVNLICGAKTQSNPENTVGVLIMAGKGVRVLVTPTSDLGKILACMHGLDVGGEMNLAAGIQVAQLALKHRQNKKQQQRIIVFAGSPVKHEKKMLEMIGRKLKKNSVALDIVNFGEEDEEKTEKLESLLAAVNNNDTSHIVHVPAGPNALSDVLISTPIFTGDGEGGSGFAAAAAAAAAGGVSGYDFGVDPNLDPELALALRVSMEEERARQEAAAKKAAEDASKQEKGGEQLAGSQEASSRDATMTDRAGASTSEAENKTTDLMDDENALLQQALAMSMDEPAVGHDVKDTDMSEASIDDPELALALQLSVADSTKDQASQSEVLADQSAVSDILASLPGVDLNDPSIKDLLASMQNKSEPQQKNDDKSSNEEKK

SEQ ID NO: 2446 - protein, 398 aa, Glycine max
MVLEATMICIDNSEWMRNGDYSPSRFQAQADAANLICGAKTQSNPENTVGVLTMAGKGVRVLVTPTSDLGKILACMHGLEIGGEMNLAAGIQVAQLALKHRQNKKQQQRIIVFAGGPVNHEKKMLEMIGRKLKKNSVALDVVNFGEEDEGKTEKLEALLSAVNNNDTSHIVHVPSGPNALSDVLISTPIFTGDGEGGSGFAAGSVSGFEFGVDPNLDPELALALRVSMEEERARQEAAAKKAAEDAAKQEKDGEQQASPQDTTMTKGVSAAASEAETKRTDLTVNENALLQQALAMSMDDPTINHDMRDTDMSEAAAEDPELALALQLSVEDSSKDSASQSDVSKLLADQSFVSSILASLPGVDPNDPSVKDLLASLQNQSEPQQKNEDKPPNEEEKK

SEQ ID NO: 2447 - protein, 398 aa, Medicago truncatula
MVLEATMICIDNSEWMRNGDYSPSRFQAQADAVNLICGAKTQSNPENTVGVLIMAGKGVRVLVTPTSDLGKILACMHGLEIGGEMNLAAGIQVAQLALKHRQNKKQHQRIIVFAGSHVKHEKKMLEMIGRKLKKNSVALDVVNFGEEDEAKTEKLEALVAAVNNNDTSHIVHVPAGPNALSDVLISTPIFTGDGEGGSGFAAAAAAAAAGGGTGYDFGVDPNLDPELALALRVSMEEERARQEAAAKKAAEDAAKQEKGGSQDATMTEGASASTSEAENKTTDLMDDENALLQQALAMSMDDPAVGHDVRDTDMSEASTDDPELALALQLSVADSTGDQASQSDVTRLLADQSRVSDILASLPGVDINDPSIKDLLASIPNQSEQQKNDDKPSNEEKK

SEQ ID NO: 2448 - protein, 404 aa, Trifolium pratense
MVLEATMICIDNSEWMRNGDYSPSRFQAQADAVNLICGAKTQSNPENTVGVLIMAGKGVRVLVTPTSDLGKILACMHGLEVGGEMNLAAGIQVAQLALKHRQNKKQQQRIIVFAGSPVKHEKKMLEMIGRKLKKNSVALDIVNFGEDDEEKTEKLESLLAAVNNNDTSHIVHVPAGPNALSDVLISTPIFTGDGEGGSGFAAAAAAAAAGGVSGYDFGVDPNLDPELALALRVSMEEERARQEAAAKKAAEDTSKQGGEQQAGSQEASSQDATMTERASASTSEAENKTTDLMDDENALLQQALAMSMDEPAVGHDVKDTDMSEASVDDPELALALQLSVADSTKDQASQSEVLADQSAVSDILASLPGVDLNDPSIKDLLASMQNKSEPQKKNDDKSSNEEKK

SEQ ID NO: 2449 - protein, 404 aa, Manihot esculenta
MVLEATMICIDNSEWMRNGDYSPSRFQAQADAINLICGAKTQSNPENTVGVLTMAGKGVRVLVTPTSDLGKILACMHGLEIGGELNLAAGIQVAQLALKHRQNKKQQQRIIVFAGSPIKHDKKALEMIGRKLKKNSVALDIVDFGEEDDGKAEKLEALLAAVNNNDSSHIVHVPPGPNALSDVLISTPIFTGDGEGGSGFAAAAAAAAAGGVSGFEFGVDPNLDPELALALRVSMEEERARQEAAAKKAAEEASKQEKGGEQPTSSQDATMTESASVTASEADNKKNDLMDEENALLQQALAMSMDNPASSHELRDTDMSEAAADDPDLALALQLSVQDGTKDSGSQTDMSKLLADQSFVSSILASLPGVDPNDPSVKDLLASMQSQSEPQEKKEEDKPKEEEK

SEQ ID NO: 2450 - protein, 403 aa, Eucalyptus grandis
MVLEATMICIDNSEWMRNGDYTPNRFQAQADAVNLICGAKTQSNPENTVGVLTMAGKGVRVLVTPTSDLGKILACMHGLEIGGEMNLAAGIQVAQLALKHRQNKKQQQRIIVFAGSPIKHDKKSLEMIGRKLKKNSVALDIVDFGEEDEGKPEKLEALLAAVNNNDTSHIVHVPSGPNALSDVLISTPIFTGDGEGGSGFAASAAAAAAGAVAGFDLGVDPSLDPELALALRVSMEEERARQEAAAKKAAEDAAKQEKGGEQQPSSQDATMTEGASGSASEVDNKKDDLMDDENALLQQALAMSMDDTTSGHDLRDTDMSEAATDDPDLALALQLSVQDSDKDSSGQTDMSKLLADQSFVSSIIASLPGVDPNDPSVKDLLASMQNQSQKKDEDKGPNEEEKQ

SEQ ID NO: 2451 - protein, 404 aa, Theobroma cacao
MVLEATMICIDNSERMRNGDYSPSRFQAQADAVNLICGAKTQSNPENTVGVLIMAGKGVRVLVTPTSDLGKLLACMHGLEIGGEMDLAAGIQVAQLALKHRQNKKQQQRIIVFAGSPIKPDKKSLEMIGRKLKKNSVALDIVNFGEDDEGKTEKLEALLAAVNNNDSSHIVHVPAGPNALSDVLISTPIFTGDGEGGSGFAAAAAAAAAGGVSGFEFGVDPNLDPELALALRVSMEEERARQEAAAKKAAEEASKQEKGGEQQSSSQDATMTEHASGATSEADNKRNDLSDDDNALLQQALAMSMDEPASSHDVQDTEMSDAAADDPELALALQLSVQDSAKDSSSQADVSKLLADQSFVSSILASLPGVDPNDPSVKEVLASMQSQSETQQKQDEDRAPNEEK

SEQ ID NO: 2452 - protein, 405 aa, Prunus persica
MVLEATMICIDNSEWMRNGDYAPSRFQAQADAVNLICGAKTQSNPENTVGVLTMAGKGVRVLVTPTSDLGKILACMHGLEIGGEMNLAAGIQVAQLALKHRQNKKQQQRIIVFAGSTVKHDKKFLEIIGRRLKKNSVALDIVNFGEEDEEKSEKLESLFKTVNNNDTSHIVHVPPGPSALSDVLISTPIFTGDGEGGSGFAAAAAAAAAGGVSGFDFGVDPNLDPELALALRVSMEEERARQEAAAKKAAEDASKQEKGGEAQSSSQDATMTERASAGTSEADNKSNDFMDDENALLQQALAMSMDEPASSHEMRDADMSEATGEDPELALALQLSVQESAKDSGSQKDMSKLLADQSFVSSILASLPGVDPNDPSVKDLLASMQNQSEPDQKKNEDKAPKEEEK

SEQ ID NO: 2453 - protein, 405 aa, Castanea mollissima
MVLEATMICIDNSEWMRNGDYSPSRFQAQSDAVNLICGAKTQSNPENTVGVLTMAGKGVRVLVTPTSDLGKILACMHGLEIGGEMDLAAGIQVAQLALKHRQNKKQQQRIIVFAGSPIKQEKKTLESIGRKLKKNSVALDIVNFGEEDDAKTEKLDALLAAVNNNDTSHIVHVPPGPNALSDVLISTPIFTGDGEGGSGFAAAAAAAAAGGVTGFEFGVDPNLDPELALALRVSMEEERARQEAAAKKAAEETSKQEKGEGQPSGTQDATMTEHASVGTSETDNKTTDLMDDDNALLQQALAMSMDEPATGHEVRDTDMSEAAADDPELALALQLSVQDSTSDSEDQSNVSKLLTDQSFVSSILASLPGVDPNDPSVKDLLASMQSQSEPQQKNEDKAPKEEEKK

SEQ ID NO: 2454 - protein, 405 aa, Quercus alba
MVLEATMICIDNSEWMRNGDYAPSRFQAQSDAVNLICGAKTQSNPENTVGVLTMAGKGVRVLVTPTSDLGKILACMHGLEIGGEMDLAAGIQVAQLALKHRQNKKQQQRIIVFAGSPIKQEKKTLESIGRKLKKNSVALDIVNFGEEDDAKTEKLDALLAAVNNNDTSHIVHVPPGPNALSDVLISTPIFTGDGEGGSGFAAAAAAAAAGGVTGFEFGVDPNLDPELALALRVSMEEERARQEAAAKKAAEETSKQEKEEGQPSGTQDATMTEHASVGTSEADNKTTDLMDDDNALLQQALAMSMDEPATGHEVRDTDMSEAAADDPELALALQLSVQDSTSDSGDQSNMSKLLTDQSFVSSILASLPGVDPNDPSVKDLLASMQSQSEPQQKNEDKAPKEEEKK

SEQ ID NO: 2455 - protein, 399 aa, Vicia sativa
MVLEATMICIDNSEWMRNGDYSPSRFQAQSDAVSLICGAKTQSNPENTVGVLTMAGKGVRVLATPTSDLGKILACMHGLEIGGEMNLAAGIQVAQLALKHRQNKKQQQRIIVFSGSPVKHEKKMLEMIGRKLKKNSVALDIVNFGEDDEGKTEKLEALLAAVNNNDSSHMVHVPPGPNALSDVLISTPIFTGDGEGGSGFAAAAAAASAGGASGYDFGVDPNLDPELALALRVSMEEERARQEAAAKKAAEDASKQEKGGEQQATSQDATMTEQTSTAASEVEPKTNDMMDDENALLQQALAMSMDDPAVSHDVRDADMSEAATDDPELARAFQLSVSDPPNDTVGRLLADQSFVSSILASLPGVDPNDPSVKDLLASMQNQSESQKKNDEGPNEEEKK

SEQ ID NO: 2456 - protein, 405 aa, Vaccinium corymbosum
MVLEATMICVDNSEWMRNGDYSPTRFQAQADAVNLICGAKTQSNPENTVGVLTMAGKGVRVLVTPTSDLGKILACMHGLEVGGECNLAAGIQVAQLALKHRQNKKQQQRIIVFVGSPVKYDKKVLEMIGRKLKKNSVALDIVNFGEEDEGKSEKLEALLAAVNNNDSSHIVHVPSGSNALSDVLISTPIFTGDGEGGSGFAAAAAAAAAGGVSGFDFGVDPNLDPELALALRVSMEEERARQEAAAKKAAEEASKQEKGGEQPSASQDATMTENVSAAAPGSEDKTSDLMDDENALLQQALAMSMDDPAASVVTRDTDMSEAAAEDQDLALALQLSVQEGSKDQASQTDMSQLLADQSFVSSILASLPGVDPNDPSVKDLLASMQSQSESEKKDDEDKAPKEDSK

SEQ ID NO: 2457 - protein, 404 aa, Actinidia deliciosa
MVLEATMICIDDSEWMRNGDYSPARFQAQADAVNLICGAKTQSNPENTVGVMTMAGKGVRVLVTPTSDLGKILACMHGLGVGGECNLAAGIQVAQLALKHRQNKKQQQRIIVFAGSPVKYDKKVLEMIGRKLKKNSVALDIVNFGEEDEGKTEKLESLLAAVNNNDSSHIVHVPPGPIALSDVLISTPIFTGDGEGGSGFAAAAAAAAAGGVSDFDYGVDPNLDPELALALRVSMEEERARQEAAAKKAAEEAAKQEKAEQQSTSQDVTMTEHATPALPESENKTNDPMDDENALLQQALAMSMDDPAASLAMQDADMSEAAAADQDLALALQLSVQDSPKDQASEDDMSKLLADQSFVTSILASLPGVDPNDPSVKDLLASMQNQPESQQTDEDKAPKEEDKK

SEQ ID NO: 2458 - protein, 407 aa, Tripterygium wilfordii
MVLEATMICIDNSEWMRNGDYSPSRFQAQADAVNLICGAKTQSNPENTVGVLTMAGKGVRVLVTPTSDLGKILACMHGLEIGGEMNLAAGIQVAQLALKHRQNKKQQQRIIVFAGSPVKHEKKLLEMIGRKLKKNSVALDIVNFGEEDDGKKEKLEALLTAVNNNDTSHIVHVPSGPTALSDVLISTPIFTGDGEGGSGFAAAAAAAAAGGVSGYDFGVDPNLDPELALALRVSMEEERARQEAAAKKAAEDAAKQEKGGELQSSSQDATMTENTTSVAASQTDNKRNDLSADVDNALLEQALAMSMDDPATSHDIRDTDMSDAVADDPELALALQLSVQESAKDSANQADVNKLLGDPSFMSSIFASLPGVDPNDPSVQDLLASMQGQSESQQKNNEDKEPNVEEK

SEQ ID NO: 2459 - protein, 404 aa, Fragaria vesca
MVLEATMICIDNSEWMRNGDYAPTRFQAQADAVNLICGAKTQSNPENTVGVLTMAGKGVRVLVTPTSDLGKILACMHGLEIGGEMNLAAGIQVAQLALKHRQNKNQQQRIIVFAGSAVNHEKKTLEMIGRKLKKNSVALDIINFGEEDEEKKEKLEALLAAVNNNNSNIVHVQAGPSALSDVLISTPIFTGDGEGGSGFAAAAAAAAAGGVSGFDFGVDPNLDPELALALRVSMEEERARQEAAAKKAAEDSSKQEKGGEEPSSSQDATMTERASAVTSEAENKSIDFMDDDNALLQQALAMSMDEPASSHDLRDTDMSEAVADDPELALALQMSVQEGEKDSASDKDMSKLLADQSFVSSILASLPGVDPNDPSVRDLLASMQNQSEPEQKKNEENKPPNDEK

SEQ ID NO: 2460 - protein, 398 aa, Manihot esculenta
MICIDNSEWMRNGDYSPSRFQAQADAINLICGAKTQSNPENTVGVLTMAGKGVRVLVTPTSDLGKILACMHGLEIGGELSLAAGIQVAQLALKHRQNKKQQQRIIVFAGSPIKHDKKALEMIGRRLKKNSVALDIVDFGEDDDGKAEKLEALLSAVNNNDSSHIVHVPSGPNALSDVLISTPIFTGDGEGGSGFAAAAAAAAAGGVSGFEFGVDPNLDPELALALRVSMEEERARQEAAAKKAAEEASKQEKGGEQPTSSQDATMTESASITAPEADNKRNDLTDEENALLQQALAMSMDDPASSHELRDTDMSEAATDDPDLAIALQLSVQDSTKDSGSQTDMSKLLADQSFVSSILASLPGVDPNDPSVKDLLASMQSQSEPQEKKEEDKPKEEEK

SEQ ID NO: 2461 - protein, 403 aa, Ricinus communis
MVLEATMICIDNSEWMRNGDYNPSRFHAQADAVNLICGAKTQSNPENTVGVLTMAGKGVRVLVTPTSDLGKILACMHGLEIGGEMNLAAGIQVAQLALKHRQNKKQQQRIIVFAGSSIKHDKKALEMIGKKLKKNNVALDIVDFGEEDDEKAEKLEALLAAVNSNDTSHIVHVPPGPSALSDVLISTPVFTGDGEGGSGFAAAAAAAAAGGVSGFEFGVDPNLDPELALALRVSMEEERARQEAAAKKAAEEAAKQEKGGEQPSSSQDATMTESASVTASEADNKRHDLTNEENALLQQALAMSMDDPASSQELRDTDMSEAAADDPELALALQLSVQDSPKDSGNPTDMSKLLADQSFVSSILASLPGVDPNDPSVKDLLASMQSQSEPQEKKDEDKPKEEK

SEQ ID NO: 2462 - protein, 466 aa, Glycine max
MVLEATMICIDNSEWMRNGDYSPSRFQAQADAVNLICGAKTQSNPENTVGVLTMAGKGVRVLVTPTSDLGKILACMHVELRVDADCRVKFARPRLKVVHSNFMMPCFGFLKGDKALSFWSFLKVEHHSGVELFNSSLTWLDIGGEMNLAAGIQVAQLALKHRQNKKQQQRIIVFAGSPVKHEKKMLEMIGRKLKKNSVALDIVNFGEEDEGKTEKLEALLAAVNNNDTSHIVHVPSGPNALSDVLISTPIFTGDGEGGSGFAAAAAAAAAGGVSGFEFGVDPNLDPELALALRVSMEEERARQEAAAKKAAEDAAKQEKGGEQQASSQDATMTERASAAMSEAENKTSDLMDDENALLQQALAMSMDDPAISHDVKDTDMSEASASDPDLALALQLSIADSTKDQGSQSDMSKLLADQSFVSSILASLPGVDPNDPSVKDLLASMQNQSEPQQKNDDKPSNEEEKK

SEQ ID NO: 2463 - protein, 404 aa, Panax ginseng
MVLEATMICIDNSEWMRNGDYSPTRFQAQADAVNLICGAKTQSNPENTVGVLTMAGKGVRVLVTPTSDLGKILACMHGLDIGGEMNLAAGIQVAQLALKHRQNKKQQQRIIVFAGGPVKYDKKVLEMIGRKLKKNSVALDVVNFGEEDDEKTEKLEALVAAVNNNDSSHIVHVPPGANALSDVLISTPIFTGDGEGGSGFAAAAAAAAAGGVSGFDFDVDPNVDPELALALRVSMEEERARQEEAAKKAAEEASNQGKGGEQESTSQDVTMTGSAAPAASEPENKTADLMDDENALLQQALAMSMDDPVATVAMRDTDMSEAAADDQDLALALQLSVQEGARDQSSQTDMSNLLADQSFVSSILASLPGVDPNDPSVKDLLASMQNQSETEQKKDEDKDPAEGK

SEQ ID NO: 2464 - protein, 404 aa, Panax ginseng
MVLEATMICIDNSEWMRNGDYSPTRFQAQADAVNLICGAKTQSNPENTVGVLTMAGKGVRVLVTPTSDLGKILACMHGLDIGGEMNLAAGIQVAQLSLKHRQNKKQQQRIIVFAGGPVKYDKKVLEMIGRKLKKNSVALDVVNFGEEDDEKTEKLEALVAAVNNNDSSHIVHVPPGANALSDVLISTPIFTGDGEGGSGFAAAAAAAAAGGVSGFDFDVDPNVDPELALALRVSMEEERARQEEAAKKAAEEASNQGKGGEQESTSQDVTMTGSAAPAASEPENKTADLMDDENALLQQALAMSMDDPVATVAMRDTDMSEAAADDQDLALALQLSVQEGARDQSSQTDMSNLLADQSFVSSILASLPGVDPNDPSVKDLLASMQNQSETEQKKDEDKDPAEGK

SEQ ID NO: 2465 - protein, 405 aa, Amsonia hubrichtii
MVLEATMICIDNSEWMRNGDYSPSRFQAQADAVNLICGAKTQSNPENTVGVLTMAGKGVRVLVTPTSDLGKILACMHGLEIGGEMNLAAGIQVAQLALKHRQNKKQQQRIIVFAGSPVKYDKKVLEMIGKKLKKNSVALDVVNFGEEDEGKTEKLEALVAAVNNNDSSHIVHVPSGPNALSDVLISTPIFTGDGEGGSGFAAAAAAAAAGGVSGFEFGVDPNLDPELALALRVSMEEERARQEAAARAAEEASRQEQGEPQSTSQDVTMTEKVQAEASEAENRTTDLMDDDNALLQQALAMSMDDSSSNVTTRDTDMPEAAADDHELQLALQLSVQDSHDPSGQSDQADVSKLLGDQSFVSSILASLPGVDPNDPSVRDLLASMQNQSEQKKDEDKAPKEDDKKE

SEQ ID NO: 2466 - protein, 395 aa, Cicer arietinum
MVLEATMICVDNSEWMRNGDYSPSRFQAQSDAVSLICGAKTQSNPENTVGVLTMAAKGVRVLATPTSDLGKILACMHGLEIGGQMNLAAGIQVAQLALKHRQNKKQQQRIIVFAGSPVKHEKKMLELIGRKLKKNSVALDIVNFGEEDEGKTEKLEALLAAVNNNDSSHMVHVPPGPNALSDVLISTPIFTGDGEGGSGFAAAAAAASAGGVSGYDFGVDPNLDPELALALRVSMEEERARQEAAAKKAAEDASKQEKGGGQHAISQDATMTENKTNDLWKQDDESALLQQALAMSMDDPEVSHDVRDTDMSEAATDDPELALALQMSVADSAKDSASQTDVSKLLADQSFVSSVLASLPGVDPNDSSVKDLLASMQSQSDQKNEEERPNEEEEK

SEQ ID NO: 2467 - protein, 403 aa, Cucumis sativus
MVLEATMICIDNSEWMRNGDYAPSRFQAQADAINLICGAKTQSNPENTVGVLTMAGKGVRVLVTPTTDLGKILACMHGLEIGGEINLAAGIQVAQLALKHRQNKKQQQRIIVFVGSPVKHEKKLLEMIGRKLKKNNVALDIVDFGEEDDGKPEKLESLLAAVNSNDTSHIVHVPAGPNVLSDVLISTPIFTGDGEGGSGFAAAAAAAAAGGVSGFDFGVDPNLDPELALALRVSMEEERARQEAAAKKAAEENTKQEKGAEQPSGSQDATMTERSGLATSDAENKAADLMDDENALLQQALAMSMDNPSGTSDIRDIDMSEAASDDPELALALQLSVQEGSSDSSSQTDMSKLLADQSFVSSILASLPGVDPNDPSVKDLLASMQSQAEDKKDEEKSSKEDEK

SEQ ID NO: 2468 - protein, 406 aa, Euonymus alatus
MVLEATMICIDNSEWMRNGDYSPSRFQAQADAVNLICGAKTQSNPENTVGVLTMAGKGVRVLVTPTSDLGKILACMHGLEIGGEMNLAAGIQVAQLALKHRQNKKQQQRIIFFAGSPVKHDKKLLEMIGRKLKKNSVALDVVNFGEEDDGKTEKLEALLTAVNNNDTSHIVHVPSGPSALSDVLISTPIFTGDGEGGSGFAAAAAAAAAGGVSGYDFGVDPNLDPELALALRVSMEEERARQEAAAKKAAEDAAKQENRGEQQSSSQDATMTENTSVTASETDNKRNDLSADVDNALLQQALAMSVDDPATSHDIRDTDMSDAAAVDPELALALQLSVQDSTKDSENQADVNKLFGDPSFMSSIFASLPGVDPNDPSVQDLLASMQGQSESQQKKTEDKEPNGEEK

SEQ ID NO: 2469 - protein, 403 aa, Citrullus lanatus
MVLEATMICIDNSEWMRNGDYAPSRFQAQADAINLICGAKTQSNPENTVGVLTMAGKGVRVLVTPTTDLGKILACMHGLEIGGEINLAAGIQVAQLALKHRQNKKQQQRIIVFVGSPVKHEKKLLEMIGRKLKKNNVALDIVDFGEEDDGKPEKLESLLAAVNSNDTSHIVHVPAGPNVLSDVLISTPIFTGDGEGGSGFAAAAAAAAAGGVSGFDFGVDPNLDPELALALRVSMEEERARQEAAAKKAAEENTKQEKGAEQPSGSQDATMTERSGLATSDAENKAADLMDDENALLQQALAMSMDNPSATSDIRDIDMSEAASDDPELALALQLSVQEGSSDSTSQTDMSKLLADQSFVSSILASLPGVDPNDPSVKDLLASMQSQAEEKKDEDKSSKEDEK

SEQ ID NO: 2470 - protein, 399 aa, Chrysanthemum coronarium
MVLEATMICIDNSEWMRNGDYSPTRFQAQADAVNLICGAKTQSNPENTVGVLTMAGKGVRVLVTPTSDLGKILACMHGLEIGGEMNLAAGIQVAQLALKHRQNKKQQQRIIVFAGGPVKYDKKVLEMIGKKLKKNSVALDVVNFGEEDEAKTEKLEALVAAVNNNDSSHIVHVPAGTNALSDVLLSTPIFTGDGEGGSGFAAAAAAAAAGGVSGFDFGVDPNLDPELALALRVSMEEERARQEAAAKKAADDSSKQEKEGESTSQDATMSENVGTSEPENKKDDLMDDENALLQQALAMSMDDPAATVTTRDVDMSEAATDDQDLALALQLSVQEGAKDQSGQADMGKLLADQSFVSSILASLPGVDPNDPSVKDLLASMQNQSESEQKKDEDKKEDDK

SEQ ID NO: 2471 - protein, 399 aa, Chrysanthemum coronarium
MVLEATMICIDNSEWMRNGDYSPTRFQAQADAVNLICGAKTQSNPENTVGVLTMAGKGVRVLVTPTSDLGKILACMHGLEIGGEMNLAAGIQVAQLALKHRQNKKQQQRIIVFAGGPVKYDKKVLEMIGKKLKKNSVALDVVNFGEEDEAKTEKLEALVAAVNNNDSSHIVHVPAGTNALSDVLLSTPIFTGDGEGGSGFAAAAAAAAAGGVSGFDFGVDPNLDPELALALRVSMEEERARQEAAAKKAADDSSKQEKEGESTSQDATMSENVGTSEPENKKDDLMDDENALLQQALAMSMDDPAATVTTRDVDMSEAATDDQDLALALQLSVQEGAKDQSGQADMGKLLADQSFVSSILASLPGVDPNDPSVKDLLASMQNQSESDQKKDEDKKEDDK

SEQ ID NO: 2472 - protein, 394 aa, Gossypium hirsutum
MVLEATMICIDNSEWMRNGDYGPSRFQAQADAVNLICGAKTQSNPENTVGVLTMAGKGVRVLVTPTSDLGKILACMHGLEIGGEMNLAAGIQVAQLALKHRQNKKQQQRIIVFAGSPVKHEKKTLEMIGKKLKKNSVTLDIVNFGEDDEGKTEKLEALLAAVNNNDTSHIVHIPAGPNALSDVLLSTPIFTGDGEGGSGFAASAAAAAAGGISGFEFGVDPNLDPELALALRVSMEEERARQEAAAKKAAEESSKQEKGGEEQDATMTERASEGASEADNKKNEFLQALAMSMDEPASSHDLQDTEMSDAATEDPELALALQLSVQDSAKDSSSQADMSKLLADQSFVSSILASLPGVDPNDPSVKEVLASMQSQSEPQQKQDEDKAPKEEDKK

SEQ ID NO: 2473 - protein, 401 aa, Echinacea purpurea
MVLEATMICIDNSEWMRNGDYSPTRFQAQADAVNLICGAKTQSNPENTVGVLTMAGKGVRVLVTPTSDLGKILACMHGLEIGGEMNLAAGIQVAQLALKHRQNKKQQQRIIVFAGSPVKYDKKVLEMIGKKLKKNSVALDVVNFGEEDEGKTEKLEALVAAVNNNDSSHIVHVPAGSNALSDVLLSTPIFTGDGEGGSGFAAAAAAAAAGGVSGFDFGVDPNLDPELALALRVSMEEERARQEAAAKKAAEDTSKQEKEGASTSQDATMSENVATSASESENKKDDLMDDENALLQQALAMSMDDPATTVTTTRDTDMSEAAADDQDLALALQLSVQEGAKDQSGETDMGKLLADQSFVSSILTSLPGVDPNDPSVKDLLASMQNQPEKKDDDKEPKEDDK

SEQ ID NO: 2474 - protein, 403 aa, Cucumis melo
MVLEATMICIDNSEWMRNGDYAPSRFQAQADAINLICGAKTQSNPENTVGVLTMAGKGVRVLVTPTTDLGKILACMHGLEIGGEINLAAGIQVAQLALKHRQNKKQQQRIIVFVGSPVKHEKKLLEMIGRKLKKNNVALDIVDFGEEDDGKPEKLESLLAAVNSNDTSHIVHVPAGPNVLSDVLISTPIFTGDGEGGSGFAAAAAAAAAGGVSGFDFGVDPNLDPELALALRVSMEEERARQEAAAKKAAEENTKQEKGAEQPSGSQDATMTERPGLATFVAENKAADLMDDENALLQQALAMSMDNPSGTSDIRDIDMSEAASDDPELALALQLSVQEGSSDSSSQTDMSKLLADQSFVSSILASLPGVDPNDPSVKDLLASMQSQAEDKKDEEKSSKEDEK

SEQ ID NO: 2475 - protein, 396 aa, Cannabis sativa
MVLEATMICIDNSEWMRNGDYSPSRIQAQADAVNLICGAKTQSNPENTVGVLTMAGKGLRVLVTPTSDLGKILACMHGLEIGGEMNLAAGIQVAQLALKHRQNKKQQQRIIVFAGSPIKHEKKTLEMIGRKLKKNSVALDIVNFGEEDDGKNEKVEALLGSVNNNDTSHIVHVPPGPNVLSDVLISTPIFTGDGEGASFAAATAAAAAGGGGFDFGVDPNLDPELALALRVSMEEERARQEAAAKRAAEEATKDGKEGEQPSSSQDATMTERATVATSGADTKAATDLTDDENALLQQALAMSMDDPASGDVRDTDMSEAAAEDPELALALQLSVQEGAKDSSNQADMSKLLADQSFVSSILASLPGVDPNDPSVKDLLASMQSQSEGDQKKSEDK

SEQ ID NO: 2476 - protein, 403 aa, Cichorium intybus
MVLEATMICIDNSEWMRNGDYSPTRFQAQADAVNLICGAKTQSNPENTVGVLTMAGKGVRVLVTPTSDLGKILACMHGLEIGGEMNLAAGIQVAQLALKHRQNKKQQQRIIVFAGGPVKYDKKVLEMIGKKLKKNSVALDVVNFGEEDESKSEKLEALVAAVNNNDSSHIVHVPAGSNALSDVLLSTPIFTGDGEGGSGFAAAAAAAAAGGVSGFDFGVDPNLDPELALALRVSMEEERARQEAAAKKAADDSSKTEKEGESTSQDATMSENVGTSASESENKKDDLMDDENALLQQALAMSMDDPAATVTTRDTDMSEAAADDQDLALALQLSVQEGAKDGSGQADMGKLLADQSFVSSILASLPGVDPNDPSVKDLLASMQNQPESEQKKDEDKAPKEDDK

SEQ ID NO: 2477 - protein, 403 aa, Cichorium intybus
MVLEATMICIDNSEWMRNGDYSPTRFQAQADAVNLICGAKTQSNPENTVGVLTMAGKGVRVLVTPTSDLGKILACMHGLEIGGEMNLAAGIQVAQLALKHRQNKKQQQRIIVFAGGPVKYDKKVLEMIGKKLKKNSVALDVVNFGEEDESKSEKLEALVAAVNNNDSSHIVHVPAGSNALSDVLLSTPIFTGDGEGGSGFAAAAAAAAAGGVSGFDFGVDPNLDPELALALRVSMEEERARQEAAAKKAADDSSKNEKEGESTSQDATMSENVGTSASESENKKDDLMDDENALLQQALAMSMDDPAATVTTRDTDMSEAAADDQDLALALQLSVQEGAKDGSGQADMGKLLADQSFVSSILASLPGVDPNDPSVKDLLASMQNQPESEQKKDEDKAPKEDDK

SEQ ID NO: 2478 - protein, 394 aa, Gossypium hirsutum
MVLEATMICIDNSEWMRNGDYGPSRFQAQADAVNLICGAKTQSNPENTVGVLTMAGKGVRVLVTPTSDLGKILACMHGLEIGGEMNLAAGIQVAQLALKHRQNKKQQQRIIVFAGSPVKHEKKTLEMIGKKLKKNSVTLDIVNFGEDDEGKTEKLEALLAAVNNNDTSHIVHIPAGPNALSDVLLSTPIFTGDGEGGSGFAASAAAAAAGGISGFEFGVDPNLDPELALALRVSMEEERARQEAAAKKAAEESSKQEKGGEEQDATMTERASEGASEADNKKNEFLQALAMSMDEPASSQDLQDTEMSDAAAEDPELALALQLSVQDSAKDSSSQADMSKLLADQSFVSSILASLPGVDPNNPSVKEVLASMQSQSEPQQKQDEDKAPKEEDKK

SEQ ID NO: 2479 - protein, 406 aa, Euonymus alatus
MVLEATMICIDNSEWMRNGDYAPSRFQAQADAVNLICGAKTQSNPENTVGVLTMAGKGVRVLVTPTSDLGKILACMHGLEIGGEMNLAAGIQVAQLALKHRQNKKQQQRIIVFAGSPVKHDKKLLEIIGRKLKKNNVALDIVNFGEEDDGKTEKLEALLTAVNSNDTSHIVHVPSGPSALSDVLISTPIFTGDGEGGSGFAAAAAAAAAGGVSGYDFGVDPNLDPELALALRVSMEEERARQEAAAKKAAEDAAKQEKGGEPQSSSQNATMTENTSVAASETDNKRNDLSADMDNALLQQALAMSMDDPATSPDMRDTDMSDAAVDDPELAMALQLSVQESTKDSANQADVNKLLGDPSFMSSIFASLPGVDPNDPSVQDLLASMQGQSESQQKKNEDKGPDGEEK

SEQ ID NO: 2480 - protein, 393 aa, Gossypium raimondii
MVLEATMICIDNSEWMRNGDYGPSRFQAQADAVNLICGAKTQSNPENTVGVLTMAGKGVRVLVTPTSDLGKILACMHGLEIGGEMNLAAGIQVAQLALKHRQNKKQQQRIIVFAGSPVKHEKKTLEMIGKKLKKNSVTLDIVNFGEDDEGKTEKLEALLAAVNNNDTSHIVHIPAGPNALSDVLLSTPIFTGDGEGGSGFAASAAAAAAGGISGFEFGVDPNLDPELALALRVSMEEERARQEAAAKKAAEESSKQEKGGEEQDATMTERASEGASEADNKKNEFLALAMSMDEPASSHDLQDTEMSDAATEDPELALALQLSVQDSAKDSSSQADMSKLLADQSFVSSILASLPGVDPNDPSVKEVLASMQSQSEPQQKQDEDKAPKEEDKK

SEQ ID NO: 2481 - protein, 403 aa, Solanum phureja
MVLEATMICIDNSEWMRNGDYSPNRFQALADAVNLICGAKTQSNPENTVGILTMAGKGVRVLVTPTSDLGKILACMHGLEIGGEMNLAAGIQVAQLALKHRQNKKQQQRIIVFAGSPVKYDKKVLEMIGRKLKKNSVALDVVNFGEDDEGKAEKLEALVAALNTNDSSHIIHIPPGPNALSDVLISTPIFTGDGEGGSGFAAAAAAAAAGGVSGYDFGVDPNLDPELALALRVSMEEERARQEAAAKKAAEEAGNQEKGENQSTSQDVAMAENVNAGTSEPESKATDLMDDENALLQQALAMSMDDSSSNVATRDTDMSEAASEDQDLALALQLSVQDSTNDQSNQTDMSKLLADQSFVSSILASLPGVDPNDPSVKDLLASMQGQSEKKDEDNDKEQKEEKK

SEQ ID NO: 2482 - protein, 397 aa, Helianthus annuus
MVLEATMICIDNSEWMRNGDYSPTRFQAQADAVNLICGAKTQSNPENTVGVLTMAGKGVRVLVTPTSDLGKILACMHGLEIGGEMNLAAGIQVAQLALKHRQNKKQQQRIIVFAGGPVKYDKKVLEMIGKKLKKNSVALDVVNFGEEDEAKTEKLEALVAAVNNNDSSHIVHVPAGSNALSDVLLSTPIFTGDGEGGSGFAAAAAAAAAGGVSGFDFGVDPNLDPELALALRVSMEEERARQEAAAKKAADDSSKQEKEGASTSQDATMSENVATSASESENKKDDLMDDENALLQQALAMSMDDPATTATARDTDMSEAAADDQDLALALQLSVQEGAKDQSGETDMGKLLADQSFVSSVLASLPGVDPNDPSVKDLLASMQNQPEKKDEDKEEDK

SEQ ID NO: 2483 - protein, 398 aa, Ambrosia trifida
MVLEATMICIDNSEWMRNGDYSPTRFQAQADAVNLICGAKTQSNPENTVGVLTMAGKGVRVLVTPTSDLGKILACMHGLEIGGEMNLAAGIQVAQLALKHRQNKKQQQRIIVFAGGPVKYDKKVLEMIGKKLKKNSVALDVVNFGEEDEAKTEKLEALVAAVNNNDSSHIVHVPAGSNALSDVLLSTPIFTGDGEGGSGFAAAAAAAAAGGVSGFDFGVDPNLDPELALALRVSMEEERARQEAAAKKAADDSSKQDKEGASSSQDATMSENVATSASESENKKDDLMDDENALLQQALAMSMDDPATTTVNTRDTDMSEAAADDQDLALALQLSVQEGAKDQSGETDMGKLLADQSFVSSVLASLPGVDPNDPSVKDLLASMQNQPEKKDEDKEEDK

SEQ ID NO: 2484 - protein, 398 aa, Ambrosia trifida
MVLEATMICIDNSEWMRNGDYSPTRFQAQADAVNLICGAKTQSNPENTVGVLTMAGKGVRVLVTPTSDLGKILACMHGLEIGGEMNLAAGIQVAQLALKHRQNKKQQQRIIVFAGGPVKYDKKVLEMIGKKLKKNSVALDVVNFGEEDEAKTEKLEALVAAVNNNDSSHIVHVPAGSNALSDVLLSTPIFTGDGEGGSGFAAAAAAAAAGGVSGFDFGVDPNLDPELALALRVSMEEERARQEAAAKKAADDSTKQDKEGASSSQDATMSENVATSASESENKKDDLMDDENALLQQALAMSMDDPATTVNTRDTDMSEAAADDQDLALALQLSVQEGAKDQSGETDMGKLLADQSFVSSVLASLPGVDPNDPSVKDLLASMQNQPEKKDEEDKEEDK

SEQ ID NO: 2485 - protein, 403 aa, Cirsium arvense
MVLEATMICIDNSEWMRNGDYSPTRFQAQADAVNLICGAKTQSNPENTVGVLTMAGKGVRVLVTPTSDLGKILACMHGLEIGGEMNLAAGIQVAQLALKHRQNKKQQQRIIVFAGGPVKYDKKVLEMIGKKLKKNSVALDVVNFGEEDEAKAEKLEALVAAVNNNDSSHIVHVPAGSNALSDVLLSTPIFTGDGEGGSGFAAAAAAAAAGGVSGFDFGVDPNLDPELALALRVSMEEERARQEAAAKKAADDSSKQDKEGESTSQDATMSENVGTSASESENKKDDLMDDENALLQQALAMSMDDPAATVTTRDTDMSEAATDDQDLALALQLSVQEGAKDQSGQAEMDKLLADQSFVSSILASLPGVDPNDPSVKDLLASMQNQAEGEQKKDEDKAPKEDDK

SEQ ID NO: 2486 - protein, 402 aa, Cyclamen graecum
MVLEATMICVDNSEWMRNGDYSPTRFQAQADAVNLICGAKTQSNPENTVGVLTMAGKGVRVLVTPTSDLGKILACMHGLEVGGECNLAAGIQVAQLALKHRQNKKQQQRIIVFVGSPVKYDKKVLEMIGRKLKKNSVALDIVNFGEEDEGKTEKLEALLAAVNNNDSSHIVHVPSGPSALSDVLISTPIFTGDGEGGSGFAASAAAAAAGGVSGFDFGVDPNLDPELALALRVSMEEERARQEAAAKKAAEEASKQGGESTSQDTTMAENVVTAAPESENKTNDPMDDENALLQQALAMSMDDPSASQAVRDIDMSEAVGDDQDLALALQLSMQEGSKEEADLTDVSKLLEDQSFVSSILASLPGVDPNDPSVKDLLASMQTQPEPEQKKDEDKAPSEEEKK

SEQ ID NO: 2487 - protein, 403 aa, Solanum melongena
MVLEATMICIDNSEWMRNGDYSPNRFQALADAVNLICGAKTQSNPENTVGILTMAGKGVRVLVTPTSDLGKILACMHGLEIGGEMNLAAGIQVAQLALKHRQNKKQQQRIIVFAGSPVKYDKKVLEMIGRKLKKNSVALDVVNFGEDDEGKAEKLEALVAAVNNNESSHIIHIPPGPNALSDVLISTPIFTGDGEGGSGFAAAAAAAAAGGVSGYDFGVDPNLDPELALALRVSMEEERARQEAAAKKAAEEAGNQEKGENQSTSQDVAMAENVNAGTSEPESKAIDLMEDENALLQQALAMSMDDSSSNVATRDTDMSEAASEDQDLALALQLSVQDSTNDQSNQTDMSKLLADQSFVSSILASLPGVDPNDPSVKDLLASMQGQSEKKDEDNDKEQKEDKK

SEQ ID NO: 2488 - protein, 403 aa, Solanum tuberosum
MVLEATMICIDNSEWMRNGDYSPNRFQALADAVNLICGAKTQSNPENTVGILTMAGKGVRVLVTPTSDLGKILACMHGLEIGGEMNLAAGIQVAQLALKHRQNKKQQQRIIVFAGSPVKYDKKVLEMIGRKLKKNSVALDVVNFGEDDEGKAEKLEALVAALNTNDSSHIIHIPPGPNALSDVLISTPIFTGDGEGGSGFAAAAAAAAAGGVSGYDFGVDPNLDPELALALRVSMEEERARQEAAAKKAAEEAGNQEKGENQSTSQDVAMAENVNAGTSEPESKATDLMDDENALLQQALAMSMDDSSSNVATRDTDMSEAASEDQDLALALQLSVQDSTNDQSNETDMSKLLADQSFVSSILASLPGVDPNDPSVKDLLASMQGQSEKKDEDNDKEQKEEKK

SEQ ID NO: 2489 - protein, 408 aa, Tabernaemontana elegans
MVLEATMICIDNSEWMRNGDYSPSRFQAQADAVNLICGAKTQSNPENTVGVLTMAGKGVRVLVTPTSDLGKILACMHGLEIGGEMNLAAGIQVAQLALKHRQNKKQQQRIIVFAGSPVKYDKKVLEMIGKKLKKNSVALDVVNFGEEDEGKTEKLEALVTAVNNNDSSHIVHVPSGPNALSDVLISTPIFTGDGEGGSGFAAAAAAAAAGGVSGFEFGVDPNLDPELALALRVSMEEERARQEAAARAAEEASRQEQGEQQSTSQDVTMTENVQAGTSEAENRTTDLMDDDNALLQQALAMSMDDSSANVTARDTDMPEAAADDHELQLALQLSVQDSHDSSNHSDQADVSKLLGDQSFVSSILASLPGVDPNDASVRDLLASMQNQSEQKKDEEDEDKTPKEDDKKE

SEQ ID NO: 2490 - protein, 404 aa, Centaurea maculosa
  Sequence also found in Organisms: Cirsium arvense
MVLEATMICIDNSEWMRNGDYSPTRFQAQADAVNLICGAKTQSNPENTVGVLTMAGKGVRVLVTPTSDLGKILACMHGLEIGGEMNLAAGIQVAQLALKHRQNKKQQQRIIVFAGGPVKYDKKVLEMIGKKLKKNSVALDVVNFGEEDEAKAEKLEALVAAVNNNDSSHIVHVPAGSNALSDVLLSTPIFTGDGEGGSGFAAAAAAAAAGGVSGFDFGVDPNLDPELALALRVSMEEERARQEAAAKKAADDSSKQDKEGESTSQDATMSENVGTSASESENKKDDLMDDENALLQQALAMSMDDPAATVTTRDTDMSEAATDDQDLALALQLSVQEGSKDQSGQAEMDKLLADQSFVSSILASLPGVDPNDPSVKDLLASMQNQPSEGDQKKDEDKAPKEDDK

SEQ ID NO: 2491 - protein, 404 aa, Centaurea maculosa
MVLEATMICIDNSEWMRNGDYSPTRFQAQADAVNLICGAKTQSNPENTVGVLTMAGKGVRVLVTPTSDLGKILACMHGLEIGGEMNLAAGIQVAQLALKHRQNKKQQQRIIVFAGGPVKYDKKVLEMIGKKLKKNSVALDVVNFGEEDEAKAEKLEALVAAVNNNDSSHIVHVPAGSNALSDVLLSTPIFTGDGEGGSGFAAAAAAAAAGGVSGFDFGVDPNLDPELALALRVSMEEERARQEAAAKKAADDSSKQDKEGESTSQDATMSENVGTSASESENKKDDLMDDENALLQQALAMSMDDPAATVTTRDTDMSEAATDDQDLALALQLSVQEGSKDQSGQAEMDKLLADQSFVSSILASLPGVDPNDPSVKDLLASMQNQPSEGDQKKDEDKTPKEDDK

SEQ ID NO: 2492 - protein, 396 aa, Trifolium pratense
MVLEATMICVDNSEWMRNGDYSPSRFQAQSDAVSLICGAKTQSNPENTVGVLTMAGKGVRVLATPTSDLGKILACMHGLEIGGEMNLAAGIQVAQLALKHRQNKKQHQRIIVFSGSPIKHEKKMLEMIGKKLKKNSVALDIVNFGEEDEGKTEKLEALLAAVNNNDSSHMVHVPPGPNALSDVLISTPIFTGDGEGGSGFAAAAAAASAGGVSGYDFGVDPNLDPELALALRVSMEEERARQEAAAKKAAEDASKQEKGGEQQAISQDATMTERTSTEAETNDMMDDENALLQQALAMSMDDAVVNHDVRDADMSEAATDDVDLARALQLSQTPASLAADPVGKLLADQSFVSSVLASLPGVDPNDPSVKDLLASMQNQSESHKKNEEDRPNEESD

SEQ ID NO: 2493 - protein, 405 aa, Mesembryanthemum crystallinum
MVLEATMICIDNSEWMRNGDYTANRFQAQADAVNLICGAKTQSNPENTVGILTMAGKGVRVLVTPTSDLGKILACMHGLDMGGEMNLAAGIQIAQLALKHRQNKKQQQRIIVFAGSPVKYDKKVLETIGRKLKKNSVALDVVDFGEDEDGKSEKLEALVAAVNNNDTSHIVHVPAGPNALSDVLISTPIFTGDGEGGSGFAAAAAAAAAGGVSGFDFGVDPNLDPELALALRVSMEEERARQEAAAKRAAEEAGRQEKGGEQQSSSQDATMGESSSAANPEAEKKNDLTDDENALLQQALAMSMDEPASTTTVRDTDMADATGDDQDLQLALQLSVQDSAKESTSQSNPEEVGKLLADQSFVSSILASLPGVDPNDPSVKDLLASMQNQSEKKDEDKPPSEEEKK

SEQ ID NO: 2494 - protein, 402 aa, Olea europaea
MVLEATMICIDNSEWMRNGDYSPNRFQAQADAVSLICGAKTQSNPENTVGVLTMAGKGVRVLVTPTSDLGKILGCMHGLEIGGEMNLAAGIQVAQLALKHRQNKKQQQRIIVFAGGPVKYDKKVLEMIGRKLKKNSVALDVVNFGEEDEGKTEKLEALVAAVNNNESSHVVHVPPGPSALSDVLISTPIFTGDGEGGSGFAAAAAAASGVSGFEFGVDPNLDPELALALRVSMEEERARQEAAAKKAAEEAAKQESGEHSASQDATISENVNTATTEPENKTKDLMDDENALLQQALAMSMDDSSSAVATRDTEMADAATDDHDLQLALQMSVQEGTKDQSNQTDMNKLLADQSFVSSILASLPGVDPNDPSVKDMLASMQSQSEPQQNKDEDKAPKEEEKK

SEQ ID NO: 2495 - protein, 400 aa, Arnica chamissonis
MVLEATMICIDNSEWMRNGDYSPTRFQAQADAVNLICGAKTQSNPENTVGVLTMAGKGVRVLVTPTSDLGKILACMHGLEIGGEMNLAAGIQVAQLALKHRQNKKQQQRIIVFAGGPVKYDKKVLEMIGKKLKKNSVALDVVNFGEEDEEKTEKLEALVAAVNNNDSSHIVHVPAGSNALSDVLLSTPIFTGDGEGGSGFAAAAAAAAAGGVSGFDFGVDPNLDPELALALRVSMEEERARQEAAAKKAADDSSKQEKEGESTSQDATMSENAATSASESENKKDDLMDDENALLQQALAMSMDDPAATVTTRDADMSEAAADDQDLALALQLSVQEGAKDQSGETDMGKLLADQSFMSSVLASLPGVDPNDPSVKDLLASMQNQPEKKDEDKAPKDEDK

SEQ ID NO: 2496 - protein, 403 aa, Solanum lycopersicum
MVLEATMICIDNSEWMRNGDYSPNRFQALADAVNLICGAKTQSNPENTVGILTMAGKGVRVLVTPTSDLGKILACMHGLEIGGEMNLAAGIQVAQLALKHRQNKKQQQRIIVFAGSPVKYDKKVLEMIGRKLKKNSVALDVVNFGEDDEGKAEKLEALVAALNTNDSSHIIHIPPGPNALSDVLISTPIFTGDGEGGSGFAAAAAAAAAGGVSGYDFGVDPNLDPELALALRVSMEEERARQEAAAKKAAEEAGNQEKGENQSTSQDVAMAENVNAGTSEPESKATDLMDDENALLQQALAMSMDDSSSNVATRDTDMSEAASEDQDLALALQLSVQDSTNDQSNPTDMSKLLADQSFVSSILASLPGVDPNDPSVKDLLASMQGQSEKKDEDNDKEQKEDKK

SEQ ID NO: 2497 - protein, 405 aa, Vinca minor
MVLEATMICIDNSEWMRNGDYSPSRFQAQADAVNLICGAKTQSNPENTVGVLTMAGKGVRVLVTPTSDLGKILACMHGLEIGGEMNLAAGIQVAQLALKHRQNKKQQQRIIVFAGSPVKYDKKVLEMIGKKLKKNSVALDVVNFGEEDEGKTEKLEALVAAVNNNDSSHIVHVPPGPTALSDVLISTPIFTGDGEGGSGFAASAAAAAAGGVSGFDFGVDPNLDPELALALRVSMEEERARQEAAARATEEASRKEQGEQQSTSQDVTMAENVKAGSSEAENRTADLMDDDNALLHQALAMSMDDSTSNVTARDTDMPEAAADDHELQLALQLSVQESQDSSKQSDQADVSKLLGDQSFVSSILASLPGVDPNDPSVKDLLASMQNQSEQKKEEDKAPKEGDKKE

SEQ ID NO: 2498 - protein, 397 aa, Trifolium pratense
MVLEATMICIDNSEWMRNGDYTPSRFQAQSDAVSLICGAKTQSNPENTVGVLTMAGKGVRVLATPTSDLGKILACMHGLEIGGEMNLAAGIQVAQLALKHRQNKKQQQRIIVFSGSPINHEKKMLEMIGRKLKKNSVALDIVNFGEEDEGKTEKLEALLAAVNNNDSSHMVQVPPGPNALSDVLISTPIFTGDGEGGSGFAAAAAAAASAGGVSGYDFGVDPNLDPELALALRVSMEEERARQEAAAKKAAEDASKQEKGGDQQAISQDATMTERTSTEAETNDMMDDENALLQQALAMSMDDAVVNHDVRDADMSEAATDDVDLARALQLSQTPASLAADPVGRLLADQSFVSSVLASLPGVDPNDPSVKDLLASMQNQSESHKKNEEERPNEESD

SEQ ID NO: 2499 - protein, 398 aa, Helianthus annuus
MVLEATMICIDNSEWMRNGDYSPTRFQAQADAVNLICGAKTQSNPENTVGVLTMAGKGVRVLVTPTSDLGKILACMHGLEIGGEMNLAAGIQVAQLALKHRQNKKQQQRIIVFAGGPVKYDKKVLEMIGKKLKKNSVALDVVNFGEEDESKTEKLEALVAAVNNNDSSHIVHVPAGANALSDVLLSTPIFTGDGEGGSGFAAAAAAAAAGGVSGFDFGVDPNLDPELALALRVSMEEERARQEAAAKKAADDSSKQGKEGESTSQDATMLENVGTSVSESENKKDDLMDDENALLQQALAMSMDDPSATVTTRDTDMSEAAADDQDLALALQYSMQEGAKDQSDMGKLLADQSFVSSILTSLPGVDPNDPSVKDLLASMQNQPEKKDDDEKAPKEDDK

SEQ ID NO: 2500 - protein, 403 aa, Panax ginseng
MVLEATMICVDNSEWMRNGDYSPTRFQAQADAVNLICGAKTQSNPENTVGVLTMAGKGVRVLVTPTSDLGKILACMHGLDIGGEMNLAAGIQVAQLALKHRQNKKQQQRIIVFAGGPIKYDKKVLEMIGRKLKKNSVALDVVNFGEEDDAKTEKLEALVAAVNNNDSSHIVHVPPGASALSDVLISTPIFTGDGEGGSGFAAAAAAAAAGGVSGFDFDVDPNVDPELALALRVSMEEERARQEEAAKKAAEETSKQEKGGEQESTSQDVTMTGSVAPAASEAENKTADLMDDENALLQQALAMSVDGPVATVAMQDTDMLEASVDDQDLALALQLSVQEGEKDQSSQTDMSNLLADQSFVSSILASLPGVDPNDPSVKDLLASMQNPSETEQKKDEDKDAENK

SEQ ID NO: 2501 - protein, 402 aa, Lactuca sativa
MVLEATMICIDNSEWMRNGDYSPTRFQAQADAVNLICGAKTQSNPENTVGVLTMAGKGVRVLVTPTSDLGKILACMHGLEIGGEMNLAAGIQVAQLALKHRQNKKQQQRIIVFAGGPVKYDKKVLEMIGKKLKKNSVALDVVNFGEEDESKSEKLEALVAAVNNNDSSHIVHVPAGSNALSDVLLSTPIFTGDGEGGSGFAAAAAAAAAGGVSGFDFGVDPNLDPELALALRVSMEEERARQEAAAKKAADDSSKNEGGESSSQDATMSENVGTSENKKDDLMDDENALLQQALAMSMDDPAAAATVTTRDADMSEAAADDQDLALALQLSVEEGGKDGSGSGQADMGKLLADQSFVSSILASLPGVDPNDPSVKDLLASMQNQPESEQKKEEDKAPKEDDK

SEQ ID NO: 2502 - protein, 400 aa, Nicotiana tabacum
MVLEATMICIDNSEWMRNGDYSPNRFQALADAVNLICGAKTQSNPENTVGILTMAGKGVRVLVTPTSDLGKILACMHGLEIGGEMNLAAGIQVAQLALKHRQNKKQQQRIIVFAGSPVKYDKKVLEMIGRKLKKNSVALDVVNFGEDDDGKAEKLEALVAAVNNNESSHIIHVPAGPNALSDVLISTPIFTGDGEGGSGFAAAAAAAAAGGVSGFDFGVDPNLDPELALALRVSMEEERARQEAAAKKAADETATQEKGETSQDVTMAENVNVGTPEPENKATDLMEDENALLQQALAMSMDDASSNVATRDTDMSEAASEDQDLALALQLSVQDSTNDQSSQTDMSKLLADQSFVSSILASLPGVDPNDPSVKDLLASMQGQSEKKDEDTDTDQKEEKK

SEQ ID NO: 2503 - protein, 403 aa, Panax ginseng
MVLEATMICVDNSEWMRNGDYLPTRFQAQADAVNLICGAKTQSNPENTVGVLTMAGKGVRVLVTPTSDLGKILACMHGLDIGGEMNLAAGIQVAQLALKHRQNKKQQQRIIVFAGGPIKYDKKVLEMIGRKLKKNSVALDVVNFGEEDDAKTDKLEAVVAAVNNNDSSHIVHVPPGASALSDVLISTPIFTGDGEGGSGFAAAAAAAAAGGVSGFDFDVDPNVDPELALALRVSMEEERARQEEAAKKAAEEASKQEKGGEQESTSQDVTMTGSVAPAASEAENKTADLMDDENALLQQALAMSVDGPVATVAMQDTDMLEASVDDQDLALALQLSVQEGAKDQSSQTDMSNLLADQSFVSSILSSLPGVDPNDPSVKDLLASMQNPSEPEQKKDEDKDAENK

SEQ ID NO: 2504 - protein, 403 aa, Citrullus lanatus
MVLEATMICIDNSEWMRNGDYAPSRFQAQADAVNLICGAKTQSNPENTVGVLTMAGKGVRVLVTPTSDLGKILACMHGLEIGGETNLAAGIQVAQLALKHRQNKKQQQRIIVFAGSPANHEKKLLEMIGKKLKKNNVALDIIDFGEEDDGKPEKLEALLSAVNSNDSSHIVHVPSGPNALSDVLISTPIFTGDGEGGSGFAAAAAAASAGGAGFDFGVDPNLDPELALALRVSMEEERARQEAAAKRAAEETSKQEKGGEQPSGSQDTTMNERASAESSDAQKTNDPMEDENALLQQALAMSMEDPASSQDLRDTEMSDAAMDPELALALQLSVQEDAKDSTSQPDMSKLLADQSFVSSILASLPGVDPNDPSVKDLLASMQSQSKPEDKKNEEKGPKEDDDK

SEQ ID NO: 2505 - protein, 403 aa, Amaranthus tuberculatus
MVLEATMICIDNSEWMRNGDYSPNRFQALSDAVNLICGAKTQSNPENTVGILTMAGKGVRVLVTPTSDLGKILACMHGLEIGGEMNLAAGIQVAQLALKHRQNKKQQQRIIVFAGSPVKYDKKVLEMIGRKLKKNSVALDVVDFGEDEEGKSEKLEALVAAVNNNETSHIVRVPPGANALSDVLISTPIFTGDGEGGSGFAAAAAAAAAGGVSGFDFGVDPNLDPELALALRVSMEEERARQEAAAKRAAEEASRQDKGGEQSGSQEATMGESNNAASSEADKRNDMTEDDDALLQQALAMSMDDPASSMAVRDIDMSDAADDQDLQLALQLSKEEGAKESTSQSSQTDMSKLLADESFVSSILASLPGVDPNDPSVKDLLATMQSQSEKKDEDKPPSEEEKK

SEQ ID NO: 2506 - protein, 400 aa, Chrysanthemum coronarium
MVLEATMICIDNSEWMRNGDYSPTRFQAQADAVNLICGAKTQSNPENTVGVLTMAGKGVRVLVTPTSDLGKILACMHGLEIGGEMNLAAGIQVAQLALKHRQNKKQQQRIIVFAGGPVKYDKKVLEMIGKKLKKNSVALDVVNFGEEDEPKKEKLEALVAAVNNNDSSHIVHVPAESNALSDVLLSTPIFTGDGEGGSGFAAAAAAAAAGGVSGFDFGVDPNLDPELALALRVSMEEERARQEAAAKKAADDSSKPGKEGESTSQDVTMSENVGTSESENKKDDLMDDENALLQQALAMSMDDPAATVTTRDVDMSEAATDDQDLALALQLSVQEGAQDQAGQADMGKLLADQSFVSSILASLPGVDPNDPSVKDLLASMQNQPESSEQKKDEDKKEGDK

SEQ ID NO: 2507 - protein, 402 aa, Cucumis sativus
MVLEATMICIDNSEWMRNGDYAPSRFQAQADAVNLICGAKTQSNPENTVGVLTMAGKGVRVLVTPTSDLGKILACMHGLEIGGETNLAAGIQVAQLALKHRQNKKQQQRIIVFAGSPANHEKKLLEMIGKKLKKNNVALDIIDFGEEDDAKPEKLEALLSAVNSNDSSHIVHVPSGPNALSDVLISTPIFTGDGEGGSGFAAAAAAASAGGGGFDFGVDPNLDPELALALRVSMEEERARQEAAAKRAADETSKQEKGGEQPSGSQDTTMNERASAESSDAQKTSDPMEDENALLQQALAMSMEDPASSDIRDTEMSDAAMDPELALALQLSVQEESKDSTSQPDMSKLLADQSFVSSILASLPGVDPNDPSVKDLLASMQSQSKPEDKKNEENPPKEDDDK

SEQ ID NO: 2508 - protein, 395 aa, Mimulus guttatus
MVLEATMICVDNSEWMRNGDYSPNRFQAQADAVNLICGAKTQSNPENTVGVLTMAGKGVRVLVTPTSDLGKILACMHGLEIGGEMNLAAGIQVAQLALKHRQNKKQQQRIIVFVGSPVKYDKKALELIGRKLKKNSVALDIVSFGEEDEEKNEKLEALLAAVNNNDSSHIVHVPCGPSALSDVLISTPIFTGDGEGGSGFAAAAAASGYEFVDPNMDPELALALRVSMEEERARQEAAAKKAAEEVANQEKGEQQSTSQDTTMTDSVNLETSRPEKKIQDLTDDENALLQQALAMSMDDPSTKAAVQDIDMSDASADHDLQLALQLSVQEESAADQSNQTDVNKLLADQSFMSSILASLPGVDPNDPHVKDLLASMQNQSETKEEDKAPKEEEKK

SEQ ID NO: 2509 - protein, 397 aa, Silene vulgaris
MVLEATMICIDNSEWMRNGDYSPNRFQSLSDAVNLICGAKTQSNPENTVGLLTMAGKGVRVLVTPTSDLGKILACMHGLEIGGEMDLAAGIQVAQLALKHRQNKKQQQRIIVFAGSPVEYEKKTLEMIGRKLKKNSVALDVVDFGEDEEGKSEKLEALVAAVNNNETSHYVHVPPGSNALSDVLISTPIFTGDGEGGSGFAAAAAAAAAGGVTGFDFGVDPNLDPELALALRVSMEEERARQEAAAKKAAEEASGQQKGESSSQDAIMGESSGSKDEADKKIDIMDDENALLQQALAMSMDEPASTTTVRDIDMSDAAVDEDLQLALQLSVEDSAKDSSSQSSQTDMSKLLSDQSFVSSILASLPGVDPNDPSVKDLLASMQNQSEKKDDDKPSEEK

SEQ ID NO: 2510 - protein, 378 aa, Glycine max
MVLEATMICIDNSEWMRNGDYSPSRFQAQADAVNLICGAKTQSNPENTVGVLTMAGKGVRVLVTPTSDLGKILACMHGLDIGGEMNLAAGIQVAQLALKHRQNKKQQQRIIVFAGSPVKHEKKMLEMIGRKLKKNSVALDIVNFGEEDEGKTEKLEALLAAVNNNDTSHIVHVPSGPNALSDVLISTPIFTGDGEGGSGFAAAAAAAAAGGVSGFEFGVDPNLDPELALALRVSMEEERARQEAAAKKAAEDAAKQEKGGEQQASSQDATMTERASAAMSEAENKTSDLMDDENALLQQALAMSMDDPAISHDVKDTDMSEASASDPDLALGNGHCITVQFKCPNSHEALKRGVLCVQHGITDPFFKYPALYASYFLH

SEQ ID NO: 2511 - protein, 398 aa, Chrysanthemum coronarium
MVLEATMICIDNSEWMRNGDYSPTRFQAQADAVNLICGAKTQSNPENTVGVLTMAGKGVRVLVTPTSDLGKILACMHGLEIGGEMNLAAGIQVAQLALKHRQNKKQQQRIIVFAGGPVKYDKKVLEMIGKKLKKNSVALDVVNFGEEDEPKKEKLEALVAAVNNNDSSHIVHVPAESNALSDVLLSTPIFTGDGEGGSGFAAAAAAAAAGGVSGFDFGVDPNLDPELALALRVSMEEERARQEAAAKKAADDSSKPGKEGESTSQDVTMSENVGTSESENKKDDLMDDENALLQQALAMSMDDPAATVTTRDVDMSEAATDDQDLALALQLSVQEGDQSGQADMGKVLADQSFVSSILASLPGVDPNDPSVKDLLASMQNQPESSEQKKDEDKKEGDK

SEQ ID NO: 2512 - protein, 400 aa, Chrysanthemum coronarium
MVLEATMICIDNSEWMRNGDYSPTRFQAQADAVNLICGAKTQSNPENTVGVLTMAGKGVRVLVTPTSDLGKILACMHGLEIGGEMNLAAGIQVAQLALKHRQNKKQQQRIIVFGGGPMKYDKKALEMIGKKLKKNSVALDVVNFGEEDEPKKEKLEALVAAVNNNDSSHIVHVPAESNALSDVLLSTPIFTGDGEGGSGFAAAAAAAAAGGVSGFDFGVDPNLDPELALALRVSMEEERARQEAAAKKAADDSSKPGKEGESTSQDVTMSENVGTSESENKKDDLMDDENALLQQALAMSMDDPAATVTTRDVDMSEAATDDQDLALALQLSVQEGAKDQAGQADMGKLLADQSFVSSILASLPGVDPNDPSVKDLLASMQNQPESSEQKKDEDKKEGDK

SEQ ID NO: 2513 - protein, 394 aa, Nicotiana benthamiana
MICIDNSEWMRNGDYSPNRFQALADAVNLICGAKTQSNPENTVGILTMAGKGVRVLVTPTSDLGKILACMHGLEIGGEMNLAAGIQVAQLALKHRQNKKQQQRIIVFAGSPVKYDKKVLEMIGRKLKKNSVALDVVNFGEDDDGKAEKLEALVAAVNNNESSHIIHVPAGPNALSDVLISTPIFTGDGEGGSGFAAAAAAAAAGGVSGFDFGVDPNLDPELALALRVSMEEERARQEAAAKKAADETATQEKGETSQDVTMAENVNAGTPEPENKATDLMEDENALLQQALAMSMDDASSNVATRDTDMSEAASEDQDLALALQLSVQDSTNDQSSQTDMSKLLADQSFVSSILASLPGVDPNDPSVKDLLASMQGQSEKKDEDTDKEQKEEKK

SEQ ID NO: 2514 - protein, 398 aa, Flaveria ramosissima
MVLEATMICIDNSEWMRNGDYAPTRFQAQADAVNLICGAKTQSNPENTVGILTMAGKGVRVLVTPTSDLGKILACMHGLEIGGEMNLAAGIQVAQLALKHRQNKKQQQRIIVFAGGPVKYDKKVLEMIGKKLKKNSVALDVVNFGEEDESKTEKLEALVAAVNNNDSSHIVHVPAGSNALSDVLLSTPIFTGDGEGGSGFAAAAAAAAAGGVSGFDFGVDPNLDPELALALRVSMEEERARQEAAAKKAADDSSKQGKEGESTSQDATMSENVGASASESENKKDDLMDDENALLQQALAMSMDDPAATVTTRDTDMSEAAADDQDLALALQYSMQEDTKDQSDVGKLLADQAFVSSILTNLPGVDPNDPSVKELLASMQTQPEKKDEDDKAPKEDDK

SEQ ID NO: 2515 - protein, 401 aa, Cucumis melo
MVLEATMICIDNSEWMRNGDYAPSRFQAQADAVNLICGAKTQSNPENTVGVLTMAGKGVRVLVTPTSDLGKILACMHGLEIGGETNLAAGIQVAQLALKHRQNKKQQQRIIVFAGSPANHEKKLLEMIGKKLKKNNVALDIIDFGEEDDAKPEKLEALLSAVNSNDSSHIVHVPSGPNALSDVLISTPIFTGDGEGGSGFVAAAAAASAGGAGFDFGVDPNLDPELALALRVSMEEERARQEAAAKRAAEETSKQEKGGEQPSGSQDTTMNERASAESSDAQKTNDPMEDENALLQQALAMSMEDPASSDIRDTEMSDAAMDPELALALQLSVQEESKDSTNQPDMSKLLADQSFVSSILASLPGVDPNDPSVKDLLASMQSQSKPEDKKNEENPPKEDDK

SEQ ID NO: 2516 - protein, 404 aa, Populus trichocarpa
MVLEATMICIDNSEWMRNGDYSPSRFQALSDAVNLICGAQTQSNPENTVGILTMAGKGVRVLVTPTSDLGKILACMHGLEIGGEVNLVAGIQVAQLALKHRQNKKQQQRIIVFVGSPIKHDKKVLEMIGRKLKKNNVALDIVDFGEEGDGKAEKLEALLAAVNSNDTSHIVHVPPGPSALSDVLINTPIFTGDGEGGSGFAAAAAAAAADGVSGFEFGVDPNLDPELALALRVSMEEERARQEAAAKTAAEEAAKQEKAREQPSSSQDATMTENNSVPAPDAYNKKNELMDEENSLLQQALAMSMDSPGSSHDVRDMDMSEATTDDPKLAPALQLPMQDSSRDSSSQMDISKLLANQSFVSSILASLPGVDPNNPSVKDLLASMQSQSKPQEKKDEDKQPKEEK

SEQ ID NO: 2517 - protein, 397 aa, Rosmarinus officinalis
MVLEATMICIDNSEWMRNGDYSPTRFDAQKDAVSLICGAKTQNNPENTVGVLTMAGKGVRVLVTPTSDLGKILACAHGVEVGGEMNLAAGIQVAQLALKHRQNKKQQQRIIVFVGSPVKYDKKVLELIGRKLKKNSVALDIVNFGEADEEKTEKLEALLAAVNNNDSSHIVHIPPGPSALSDVLISTPIFTGDGEGASGYVAAAAAAGGSGFEFGVDPNLDPELALALRVSMEEERARQEAAAKKASEEAAAKGEQQSTSQDATMTENVNPGTSEPEKKTHDLMDDENALLQQALAMSMDDSSSKVAVRDTDMSDASADDHDLQLALQLSVQDSQGDQSNPNDANKILADQSFMSSMLAQLPGVDPNDPAIKDLLASMQNQSEKKEEGKEPEEEEKK

SEQ ID NO: 2518 - protein, 393 aa, Mimulus guttatus
MVLEATMICIDNSEWMRNGDYPPNRFQAQADAISLICGAKTQSNPENTVGVLTMAGKGVRVLVTPTSDLGKILACMHGLEIGGEMNLAAGIQVAQLALKHRQNKKQQQRIILFAGSPIGYEKKVLELIGKKLKKNSVALDIVNFGEEDGEKSEKIEALLSAVNNNDSSHIVHVAPGPSALSDVLISTPIFTGDGEGGSGFAAAGGVSGLDFGVDPNVDPELALALRVSMEEERARQEAAAKKAAEEATKQETGEGQSAPQDATMTESATSIPEKKTNDLMDDENALLQQALAMSMDDPSSSAVVRDTDMLDASADDHDLQLALQLSVEDRAVDQSNQTDVNKLLADQSFVSSILASLPGVDPNDPHVKDLLASMQNQSEKEDEDKGSKDEDKK

SEQ ID NO: 2519 - protein, 389 aa, Trigonella foenum-graecum
MVLEATMICMDNSEHMRNGDYSPTRFQAQSDATSLICGAKTQSNPENTVGLITMAGKGVRVLATPTSDLGKILGCMHGLEIGGEMNLAAAIQVAQLALKHRQNKKQQQRIIVFCGSPVKHEKKMLEMIGRKLKKNSVALDIINFGEEDEGKTEKLEALLAAVNNNDSSHMVHVPPGPNALSDVLISTPIFTGDGEGGSGFAAAAAAASAGGVSGYDFGVDPNLDPELALALRVSMEEERARQEAAAKKAAEDASKQEKGGEQQAISQDATMTERTSTEAETMDDENALLQQALAMSMDDPAVNHDVRDADMSEAATDDPELARALQLSVSDTTTDEVTRLLADQSFVSHVLATLPGVDPNDPSVKDLLASMQSQSNAQKKKEEEGPNEE

SEQ ID NO: 2520 - protein, 405 aa, Aristolochia fimbriata
MVLEATMICIDNSEWMRNGDYSPTRFQAQADAVNLICGAKTQSNPENTVGVLTMAGKGVRVLVTPTSDLGKILACMHGLEIGGEMNLTAGIQVAQLALKHRQNKKQQQRIIVFAGSPVKYDKKVLETIGKKLKKNSVALDIVDFGEEDDGKHEKLEALIAAVNNNDSSHIVHVPSGQNALSDVLLTTPIFTGDGEGGSGFAAAAAAAAAGGGGFDFGVDPNLDPELALALRVSMEEERARQEAAAKKAAEEASRQGKEGEQASSSQDATMAEPVSASDPADNKRNELTDYETALLEQALAMSMDDPRSSQSEGGAVGDTDMSEATAEDQELAFALQMSVQDSAKDQPSQSEMNKVLGDQSFVTSILASLPGVDPNDPSVKDLLASLQGQSEQKKDEDQPPKEEDK

SEQ ID NO: 2521 - protein, 367 aa, Actinidia deliciosa
MVLEATMICIDNSEWMRNGDYSPTRFQAQTDAVNLICGAKTQSNPENTVGVMTMAGKGVRVLVTPTSDLGKILACMHGLEVGGECNLAAGIQVAQLALKHRQNKKQQQRIIVFVGSPVKYDKKVLEMIGRKLKKNSVALDIVNFGEEDEGKTEKLEALLAAVNNNDSSHIVHVPTGPNALSDVLISTPIFTGDGEGGSGFAAAAAAAAAGGVSGFDFGVDPNLDPELALALRVSMEEERARQEAAAKKAAEEAAKQEKGGEQQSTSQDATMTENVSAAAPEAENKTSDLMDDENALLQQALAMSMDGPAASLAMRDTDMSEAAADDQDLALALQLSVQDSTKDQGSETDMSKLLADQSFVSSILASL

SEQ ID NO: 2522 - protein, 389 aa, Medicago truncatula
MVLEATLIIMDNSEHMRNGDYSPSRFQAQSDTVSLICGAKTQSNPENTVGVMTMAGKGVRVLSTPTSDLGKILGCMHGLEIGGEINLAAAIQVAQLALKHRQNKKQQQRIVVFCGSPVKHEKKMLEMIGRKLKKNSVALDIVNFGEEDEGKTEKLEALLTAVNNNDSSHMVHVPPGPNALSDVLISTPIFTGDGEGGSGFAAAAAAASAGGVSGYDFGVDPNLDPELALALRVSMEEERARQEAAAKKAAEDASKQEKGGEQQATSQDATMTERTSTEAEPMDDENALLQQALAMSMDDPAVNHDGRDADMSEAATDDPELARALQLSVSDTTTDEVTRLLADQSFVSHVLATLPGVDPNDPSVKDLLASMQNQSNAHKKNEEEGPNEE

SEQ ID NO: 2523 - protein, 103 aa, Arabidopsis lyrata
MAYVDHAFSISDEDLMIGTSYTVSNRPPVKEISLAVALLVFGTLGIVSGFFMAYNRVGGDRGHGIFFIVLGCLLFIPGFYYTRIAYYAYKGYKGFSFSNIPSV

SEQ ID NO: 2524 - protein, 103 aa, Eutrema halophilum
MAYVDHAFSISDEDLMIGTSYTVSNRPPVKEISLAVALLVFGTLGIVSGFFMAYNKVGGDRGHGIFFIVLGCLLFIPGFYYTRIAYYAYKGYKGFSFSNIPSV

SEQ ID NO: 2525 - protein, 103 aa, Brassica napus
  Sequence also found in Organisms: Brassica oleracea, Raphanus sativus
MAYVDHAFSISDEDLMIGTSYTVSNRPPVKEISLAVSLLLFGILGIVSGFFMAYNRVGGDRGHGIFFIVLGCLLFIPGFYYTRIAYYAYKGYKGFSFSNIPSV

SEQ ID NO: 2526 - protein, 103 aa, Brassica rapa
MAYVDHAFSISDEDLMIGTSYTVSNRPPVKEISLAVSLLLFGILGIVSGFFMAYNRVGGDRGHGIFFIVLGCLLFIPGFYYTRIAYYAYKGYKGFSFSNIPSL

SEQ ID NO: 2527 - protein, 103 aa, Cleome gynandra
MAYVDHAFSISDEDLMIGTSYAVNNRPPVKEISLAVALLVFGTLGIVLGFFMAYNRVGGDQGHGIFFVVLGCILFIPGFYYTRIAYYAYKGYKGFSFSTIPSV

SEQ ID NO: 2528 - protein, 103 aa, Eutrema halophilum
MAYVDHAFSISDEDIMIETSYTVNNRPPVKEIALAVALLVFGTLGIVSGFFMAYNRVGGDRGHGIFFIVLGCLLFIPGFYYTRIAYYAYKGYKGFSFSNIPPV

SEQ ID NO: 2529 - protein, 103 aa, Arabidopsis lyrata
  Sequence also found in Organisms: Arabidopsis thaliana
MAYVDHAFSITDEDIMIETSYTVNNRPPVKEIALAVALLVFGTLGIVSGFFMAYNRVGGDRGHGIFFIVLGCLLFIPGFYYTRIAYYAYKGYKGFSFSNIPPV

SEQ ID NO: 2530 - protein, 103 aa, Brassica juncea
  Sequence also found in Organisms: Brassica napus, Brassica rapa
MAYVDHAFSISDEDLMIGTSYTVSNRPPVKEISLAVALLLFGIVGIVSGFFMAYNRVGGDRGHGVFFIVLGCLVFLPGFYYTRIAYYAYKGYTGFSFSNIPSV

SEQ ID NO: 2531 - protein, 103 aa, Brassica napus
  Sequence also found in Organisms: Brassica oleracea, Brassica rapa
MAYVDHAFSISDEDMMIETSYTVNNRPPVKEIALAVALLVFGALGIVSGFFMAYNRVGGDRGHGIFFIVLGCLLFIPGFYYTRIAYYAYKGYQGFSFSNIPPV

SEQ ID NO: 2532 - protein, 103 aa, Brassica napus
  Sequence also found in Organisms: Brassica oleracea
MAYVDHAFSISDEDLMIGTSYTVSNRPPVKEISLAVALLLFGIVGIVSGFFMAYNRVGGDRGHGVFFIVLGCLVFIPGFYYTRIAYYAYKGYKGFSFSSIPSA

SEQ ID NO: 2533 - protein, 103 aa, Brassica juncea
MAYVDHAFSISDEDMMIGTAYTVNNRPPVKEIALAVALLVFGTLGIVSGFFMAYNLVGGDRGHGIFFMVLGCLLFIPGFYYTRIAYYAYKGYQGFSFSNIPPV

SEQ ID NO: 2534 - protein, 103 aa, Raphanus sativus
MAYVDHAFSISDEDMMFETSYTVNNRPPVKEIALAVALLVFGALGIVSGFFMAYNRVGGDRGHGIFFIVLGCLLFIPGFYYTRIAYYAYKGYQGFSFSNIPPV

SEQ ID NO: 2535 - protein, 103 aa, Brassica juncea
MAYVDHAFSISDEDMMIGTAYTVNSRPPVKEIALAVALLVFGALGIVSGFFMAYNRVGGDRGHGIFFMVLGCLLFIPGFYYTRIAYYAYKGYQGFSFSNIPPV

SEQ ID NO: 2536 - protein, 103 aa, Brassica napus
MAYVDHAFSISDEDMMIGTAYTVNNRPPVKEIALAVALLVFGALGIVSGFFMAYNLVGGDRGHGIFFVVLGCLLFIPGFYYTRIAYYAYKGYQGFSFSNIPPV

SEQ ID NO: 2537 - protein, 103 aa, Brassica juncea
MAYVDHAFSISDEDMMIGTAYTVNNRPPVKEIALAVALLVFGALGIVSGFFMAYNLVGGDRGHGIFFMVLGCLLFIPGFYYTRMAYYAYKGYQGFSFSNIPPV

SEQ ID NO: 2538 - protein, 103 aa, Brassica rapa
MAYVDHAFSISDEDMMIGTAYTVNSRPPVKEIALAVALLVFGALGIVSGFFMAYNLVGGDRGHGIFFMVLGCLLFIPGFYYTRIAYYAYKGYQGFSFSNIPPV

SEQ ID NO: 2539 - protein, 103 aa, Tropaeolum majus
MAYVDHAFSISDEDIMMETSYTVNNRPPIKEISLAVGLLIFGTIGIILGFFMAYNRIGGDRAHGVFFGVLGCLLFIPGAYYTRIAYYAYKGYKGFSFSNIPPV

SEQ ID NO: 2540 - protein, 103 aa, Carica papaya
MAYVDHAFSISDEDIMMETSYAVNNRPPIKEISLAVALLVFGTLGIVSGIIMAYNRVGGDRGHGIFFTVLGCILFLPGFYYTRIAYYAYKGYKGFSFSNIPPV

SEQ ID NO: 2541 - protein, 103 aa, Humulus lupulus
MAYVDHAFSITDEDIMMGTSYTVNNRPPIKEIALAVALLVFGTLGIVLGIFMAYNRVGGDRAHGSFFAILGAILFIPGFYYTRIAYYAYKGYKGFSFSNIPPV

SEQ ID NO: 2542 - protein, 103 aa, Theobroma cacao
MAYVDHAFSISDEDIMMETSYAVNNRPPFKEIGLAVALLVFGTLGIILGTFMAYNKVGGDRGHGLFFAILGCILFIPGFYYTRIAYYAYKGYKGFSFSNIPPV

SEQ ID NO: 2543 - protein, 103 aa, Cleome spinosa
MAYVDHAFSISDEDIMVGTSYTVNNRPPIKEISLAVALLVFGTLGIVSGVLMAYNKVGGDRAHGLFFTILGCILFIPGFYYTRIAYFAYKGYKGFSFSNIPPV

SEQ ID NO: 2544 - protein, 103 aa, Cannabis sativa
MAYVDHAFSITDEDIMMGTSYTVNNRPPIKEIALAVALLFFGTLGIVLGIFMAYNRIGGDRAHGSFFAILGAILFIPGFYYTRIAYYAYKGYKGFSFSNIPPV

SEQ ID NO: 2545 - protein, 103 aa, Euonymus alatus
MAYVDHAFSISDEDIMIGTSYTVNNRPPIKEIALAVALLVFGTLGMVLGIIMSYNRVGGDRGHGIFFAIMGIVLFIPGFYYTRIAYYAYKGYTGFSFSNIPPL

SEQ ID NO: 2546 - protein, 103 aa, Euonymus alatus
MAYVDHAFSISDEDIMIGTSYAVNNRPPIKEIALAVALLVFGTLGMVSGIIMSYNRVGGDRGHGIFFMILGIVLFIPGFYYTRIAYYAYKGYKGFSFSNIPPL

SEQ ID NO: 2547 - protein, 103 aa, Tripterygium wilfordii
MAYVDHAFSISDEDIMIEASYTVNNRPPIKEIALAVGLLVFGTLGMVSGIIMSYNRVGGDRGHGIFFAILGIVLFIPGFYYTRIAYYAYKGYKGFSFSNIPPL

SEQ ID NO: 2548 - protein, 103 aa, Aristolochia fimbriata
MAYVDHSFSISDEDLMMETSYVVHNRPPIKEIALAVSLLIFGTLGIVMGIFMAYDRVGGDRAHGIFFAILGSMLFIPGFYYTRIAYYAYKGYKGFSFSNIPPV

SEQ ID NO: 2549 - protein, 103 aa, Citrus clementina
  Sequence also found in Organisms: Citrus sinensis
MAYVDHAFSISDEDIMMETSYTVNNRPPIKEIVLAVSLLVFGTFGIICGTIMAYNRVGGDRAHGVFFAVLGAILFIPGFYYTRIAYYAYKGYKGFSFNNIPSV

SEQ ID NO: 2550 - protein, 103 aa, Gossypium raimondii
MAYVDHAFSITDEDILVDTSYAVNNRPPFKEIGLAVSLLVFGTLGIILGIFMAYNRVGGDRAHGLFFTLLGCVLFIPGFYYTRIAYYAYKGYKGFSFSNIPPV

SEQ ID NO: 2551 - protein, 103 aa, Tropaeolum majus
MAYVDHAFSISDEDIMIETSYTVNDRPPIKEISLSVALLVFGTLGIISGFFMAYNRVGGDRAHGLFFALLGSILFIPGFYYTRIAYYAYKGYQGFSFANIPPV

SEQ ID NO: 2552 - protein, 103 aa, Trifolium pratense
MAYVDHAFSISDEDIMIGTSYTVNNKPPIKEIALAVSLLVFGFLSIIIGFFMAYNHVGGDIAHGLFFAILGMLVFIPGFYYTRIAYYAYKGYKGFSFSNIPPV

SEQ ID NO: 2553 - protein, 103 aa, Vitis vinifera
MAYVDHAFSISDEDIMMETSYIVHNRPPIKEIALAVALLVFGTLGIILGILMVYNRVGGDRAHGLFFAILGAILFIPGFYYTRIAYYAYKGYKGFSFSNIPPV

SEQ ID NO: 2554 - protein, 103 aa, Medicago truncatula
MAYVDHAFSISDEDIMIGTSYTVNNKPPVKEIALAVSLLVFGFLSIIIGSLMAYNHVGGDTAHGLFFAILGMLLFIPGFYYTRIAYYAYKGYKGFSFSNIPPV

SEQ ID NO: 2555 - protein, 103 aa, Populus trichocarpa
MAYVDHAFSITDEDLMVETSYTVNNKPPIKEIALAVALLVFGVVGIVLGTFMTYNRVGGDRGHGLFFAILGVVLFIPGFYYTRIAYFAYKGYKGFSFSNIPPV

SEQ ID NO: 2556 - protein, 102 aa, Arachis hypogaea
MYVDHAFSISDEDMMMGTSYTVNNKPPIKEISLAVALLVFGTLGIIIGSLMAYNHVGGDTAHGLFFAILGTLLFIPGFYYTRIAYYAYKGYKGFSFSNIPPV

SEQ ID NO: 2557 - protein, 103 aa, Zostera marina
MAYVDHAFSITDEDIMMETSYIVQNKPPIKEIALAVSLLVFGTLGIVLGLIMAANRVGGDRAHGIFFAVLGSVLFLPGFYYTRIAYYAYKGYKGFSFANIPPV

SEQ ID NO: 2558 - protein, 340 aa, Arabidopsis lyrata
MAEYICLFGKDSAAIVIKQPKKSPLFLRMIVLVFAMVCGLYICSVCLKQLSNVSFQSSQLVQTTPFDSHSLGFVTRIHYPKPQTFNRAECGHNPVRYFAILSMQRSGSGWFETLLNSHSNVSSNGEIFSVLDRRKNISSIIQTLDRVYNLDWFTSASKNECSAAIGFKWMLNQGLLDNHKEIVDYFNRRGVSAIFLFRRNPLRRMVSVLANSYDRYAKLLNGTHKSHVHSPEEADALSRYKPVINSTSLIHDLQETENSAAKALEYFNTTRHIVVFYEDLITNQTTLKQVQEFLNIPVKDLSSRQVKIHRGDLSDHIKNWEDINKTLNGTEYEKFLRADY

SEQ ID NO: 2559 - protein, 339 aa, Eutrema halophilum
MAEFVCLFGKDSASIVIKPPKKSPLFLRMIVLVFAMVCGLYICSVCLKQFGNVNLQSSQLVPNPIDSRSLHVVTRIHYPKPQTFNRAECGHNPVRFFAILSMQRSGSGWFETLLNSHNNVSSNGEIFSVLDRRRNISSIIQTLDRVYNLDWLTSASKNECSAAIGFKWMFNQGLLDNHEAIVDYFNRRGVSAIFLFRKNPLRRMVSVLANSYDRYAKLLNGTHKSHVHSPEEADALSRYKPVINSTSLIHDLQETENLAAKALEYFNTTRHMVVFYEDLITNRTKLKQVQEFLNIPVKDLSSRQVKIHRGDLSDHIKNWEDINKTLNGTEYEKFLRADY

SEQ ID NO: 2560 - protein, 336 aa, Brassica oleracea
MAEFICLFGKDSASIVIKQPKKSPLFLRMIVLVFAMVCGLYICSVCLKQFSFQTSQLVPNPVGSHSSHVLTRIHYPKPQTFNRAECGHNPVRFFAILSMQRSGSGWFETLLNSHDNVSSNGEIFSVLERRKNVSSIVETLDRVYNLDWFTSASKNECSAAIGFKWMLNQGLLANHVEIVDYFNRRGVSAIFLFRRNPLRRMVSLLANSYDRYAKLLNGTHKSHVHSPEEADALSRYKPVINSTSLIHDLQETESLAAKALEYFNTTRHMVVFYEDLITNRTRLKEVQEFLSIPVKDLSSRQVKIHRGDLSDHIKNWEDINKTLNGTEYEKFLRADY

SEQ ID NO: 2561 - protein, 336 aa, Brassica rapa
MAEFICLFAKDSASIVIKQPKKSPLFLRMIVLVFAMVCGLFICSVCLKQFSLQTSQLVPSPVVSHSLHVLTRIHYPMPQTFNRAECGHNPVRFFAILSMQRSGSGWFETLLNSHDNVSSNGEIFSVLERRKNVSSIVETLDRVYNLDWFTSASKNECSAAIGFKWMLNQGLLANHVEIVDYFNRRGVSAIFLFRRNPLRRMVSLLANSYDRYAKLLNGTHKSHVHSPEEADALSRYKPVINSTSLIHDLQETESLAAKALEYFNTTRHMVVFYEDLITNRTRLKEVQEFLSIPVKDLSSRQVKIHRGDLSDHIKNWEDINKTLNGTEYEKFLRADY

SEQ ID NO: 2562 - protein, 329 aa, Brassica oleracea
MAEFICLYGKDSASIVIKQPKRSPLFLRMIVLVFAMVCGLYISSVCLKQFSFQTSQLVPTPITTRIHYPKPQTFNRSECGHNPVRFFAILSMQRSGSGWFETLLNSHDNVSSNGEIFSVLDRRRNVSSIVKTLDRVYNLDWFTSASKNECSAAIGFKWMLNQGLIDNHQEIVDYFNRRGVSAIFLFRRNPLRRMVSVLANSYDRYAKLLNGTHKSHVHSPEEADALSRYKPVINSTSLIHDLQETESLAAKALEYFNTTRHMVVFYEDLITNRTRLEQVQEFLNIPVKNLSSRQVKIHRGDLSDHIKNWEDINKTLNGTEYEKFLRADY

SEQ ID NO: 2563 - protein, 329 aa, Brassica napus
MAEFICLYGKDSASIVIKQPKRSPLFLRMIVLVFAMVCGLYISSVCLKQFSFQTSQLVPTPITTRIHYPKPQTFNRSECGHNPVRFFAILSMQRSGSGWFETLLNSHDNVSSNGEIFSVLDRRMNVSSIVKTLDRVYNLDWFTSASKNECSAAIGFKWMLNQGLIDNHQEIVDYFNRRGVSAIFLFRRNPLRRMVSVLANSYDRYAKLLNGTHKSHVHSPEEADALSRYKPVINSTSLIHDLQETESLAAKALEYFNTTRHMVVFYEDLITNRTRLEQVQEFLNIPVKNLSSRQVKIHRGDLSDHIKNWEDINKTLNGTEYEKFLRADY

SEQ ID NO: 2564 - protein, 329 aa, Brassica rapa
MAEFICLYGKDSASIVIKQPKRSPLFLRMIVLVFAMVCGLYISSVCLKQFSFQTSQLVPTPITTRIHYPKPQTFNRSECGHNPVRFFAILSMQRSGSGWFETLLNSHDNVSSNGEIFSVLDRRRNVSSIVKTLDRVYNLDWFTSASKNECSAAIGFKWMLNQGLIDNHQEIVDYFNRRGVSAIFLFRRNPLRRMVSVLANSYDRYAKLLNGTHKSHVHSPEEADALSRYKPVINSSSLIHDLQETESLAAKALEYFNTTRHMVVFYEDLITKRTRLEQVQEFLNIPVKNLSSRQVKIHRGDLSDHIKNWEDINKTLNGTEYEKFLGADY

SEQ ID NO: 2565 - protein, 311 aa, Eutrema parvulum
MIVLVFAMVCGLYICSVCLKQFGNVSLQSSQLVSNPIDSRSLHVVTRIHYPKPQTFNRAECGRNPVRFFAILSMQRSGSGWFETLLNSHNNVSSNGEIFSVLDRRRNISSIIQTLDRVYNLDWFTSASKNECSAAIGFKWMLNQGLLDNHKEIVDYFNRRGVSAIFLFRRNPLRRMVSVLANSYDRYAKLLNGTHKSHVHSPEEADALSRYKPVINSTSLIHDLQETENLAAKALEYFNTTRHMAVFYEDLITNRTRLKQVQEFLNIPVKDLSSRQVKIHRGDLSDHIKNWEDINKTLNGTEYEKFLRADY

SEQ ID NO: 2566 - protein, 612 aa, Zea mays
MRGGGGASWLSFRGVVVEEEEAVVSAPEKPMRRGRRRWGAEVDDGYSPSSTGGGGSSCCDSFGCDSPLAGFVRPDGDPDTDLETDGLATSTSSAFTERQDDEAEEALYGVKEEEWAQIQEPAKNPAFRATPECHKQRYRTDAAVLLHGRKGSKQRPASLDLGSPGFHGATFSPSFVIGGVGLMNKGLGASVIRSDVFHSPGTPNYPRHRASVLGCHKGWSSERVPHPSKGNRRYPGSSMAFPYSNGRTLPSKWEDAERWIFSPNSSDALGRTTVAHARRPKSKSGPLGPPGRLGGQYSSVSSVSLLDNGRAGPITANSPFAAGVLMPEHVCEGKSTNGTYSSRPIGNEINIGRGVKICPLNGGSHPVRTSRVRQRLDYAVESSVSLPSTQESVQDEQVEITEDSASTIASIISRKDAATQTSPELSRSSSPNTRPTFNGSLSTEQVKENGSCLSDLDIRDVQMDDRVTLTRWSKKNVTRSSNKNSTNIIEWSEKTVESKSSSWGFAKAKCISKIDREDTEITAWENIEKAKADAAIQKLVIKLEKKRSSSLDKILNTLKSAQRKSQVMHEHERDAVTANQDGKGSRKAKKRAQLSKNGQISSLSGCFTCHAF

SEQ ID NO: 2567 - protein, 606 aa, Setaria italica
MRGGGGGSGLGFRGMVVEEGEEEEVVSAPERPMQRRRRRWGVEVDDGYSPSSTGGGGSSCCDSFGCDSPLAGFVRPDGDPDTDLETDGLATSSSSAFTERQDDEEVLCGVKEEEWAKVQESAKNLAGRATPECHNERYGTEAAVLLHGRKGSKQRPASLDLSSPGFHGATFSPSFVVGGVGLMKASHIRSDVFHSPGTPNYPRHRASVLGFQKGWCSERVPHPSKASRRYPGSSMAFPYSNGRTLPSKWEDAERWIFSPNSSDALIRSTVAHARRPKSKSGPLGPPGRLGGQYSSVSSVSLLDSGRAGPITSNSPFMAGVLMPEHVCGGKNANGMYLGRPAGDETAIGSSVRFCAPNGVSHAIRSSRVRRQLDAAVESSASLPSTQESIQGEQVEITEDSATTFASMISRKDAATQTSPELSRSSSPNTRPTFTRSLSTQQVKESESCFSDLEIRDVQMDDRVTLTRWSKKNVTRSSNKNSTNIIEWKEKTVESKSSSWGFAEAKCISRIEREDAKITAWENIQKAKAEAAIQKLVIKLEKKRSSSLDKILNTLKSAQRKAQVMRERDAATANQDEKGSRKAKKTAQLSKNGQISSLSGCFTCHAF

SEQ ID NO: 2568 - protein, 611 aa, Panicum virgatum
MRGGGGSGLGFRGVLVEEEGEEVTSAPERPMRRRRRRWGVEVDDGYSPSSTGGGGSSCCDSFGCDSPLAGFVRPDGDPDTDLETDGLATSSSSASAAFTERQDDEEVLCGVKEEEWAKIQEQAKNPAGRSTPECHNQRHGTEATVLLHGRKGSKQRPASLDFGSPGFHGATFSPNFVVGGVGLMNKGFVASHIRSDVFHSPGTPNYPRHRASVLGFQKGWCSERVPHPSKGSRRYPGSSMAFPYSNGRTLPSKWEDAERWIFSPNSSEALGRNTVAHARRPKSKSGPLGPPGRLGGQYSSVSSVSLLDSGRAGPITSNSPFVAGVLMPEHVCGGKNANGTYSGRPAGDETTVGSNLRFCPPNGGSHAIRSSRVRRRLDAAIESSSSLPSTRESIQGEQVEITEDSATTFASMISRKDAATQTSPELSGSSSPNTRPTFTRSQSTQQVKESESCFSDLEIRDVQMDDRVTLTRWSKKNVTRSSNKNSTNIIEWKEKTVESKSSSWGFAEAKCISKIEREDAKITAWENIQKAKAEAAMQKLVIKLEKKRSSSLDKILNTLKSAQRKAQVMRERDAATANQDEKGSRKGKKTAQLSKNGQISALSGCFTCHAF

SEQ ID NO: 2569 - protein, 587 aa, Panicum virgatum
MRGGGGGSGLGFPGGVLVEEEGEEVVSAPERPMWRRRWGVEVDDGYSPSSTGGGGSSCCDSFGCDSPLAGFVRPDGDPDTDLETDGLATSSSSASAAFTERQDDEEVLCGVKEEEWAKVQEPAKNPAGRSTPECHNQQHRTEATVLLHSRKGSKQRPASLDFGSPGFHGATFSPNFVVGGVGLMNKGLVASHIRSDVFHSPGTPNYSRHRASVLGFQKGWCSERVPHPSKGSRRYPGSSMAFPYSSGRTLPSKWEDAERWIFSPNSSEALGRSTVAHARQPKSKSGPLGPPGRLGGQYSSVSSVSLLDSGRAGPITSNSPFVAGVLMPEHVCGGKNANGTYSGRPAGDETTIGSNVRFCPPNGGSHAIRSSRVRRRLDAAIESSSSLPSTRESIQGEQVEITEDSATTFASMISRKDAATQTSPELSRSSSPNNTRPTFTRSRSTQQVKESESCFSDLEIRDVQMDDRVTLTRWSKKNVTRSSNKNSTNIIEWKEKTVESKSSSWGFAEAKCISKIEREDAKITAWENIQKAKAEAAIQKLVIKLEKKRSSSLDKILNTLKSAQRKAQVMRERDAATAKPKNEKKDV

SEQ ID NO: 2570 - protein, 561 aa, Echinochloa colona
TGGGRSSCCDSFGCDSPLAGFVRPDGDPDTDLETDGLATSSSSASAPFTERQDEEEVLCGVKEEEWAQVQESAKNPAGRATPECPNQRYGTEAAVLLHGRKGSKQRPASLDFGSPGFHGATFSPNFVVGGVGLMNKGLVASRIRSDVFHSPGTPNYPRHRASVLGFQKGWCSERVPHPSKGSRRYPGSSMAFPYSNGRTLPSKWEDAERWIFSPNSSDALGRSTIVHARRPKSKSGPLGPPGRLGGQYSSVSSVSMLDSGRAGPITSNSPFVAGVLMPEHVCGGKNANGMYIGRLAGEETTIGDGVRFCPPNGGSHAVRSSRVRRRLDAAVESSASLPSTRESTGGDQVEITEDSATTIASVVSRKDAATQTSPDLSRSSSPNTRPTFTRSLSMQQVKESESCLSDLEFRDVQMDDRVTLTRWSKKNVTRSSNKNSTDIIEWKEKAVESKSSSWGFAEAKCISKIERKDAKITAWENIQKAKAEAAIQKLVIKLEKKRSSSLDKIWNTLKSAQRKAQVMRERDAATANQDEKGSRKAKKTAQLSRNGQISSLSGCFTCHAF

SEQ ID NO: 2571 - protein, 365 aa, Vigna unguiculata
MWPLTAQPFIKSHFLKHTLPLLLMANQTSLSFSSGSPVHAPLKRVGTHNGSFHCDEALGCFMIRLTHKFNNAEIVRTRDPQVLEGLDAVLDVGGVYDPARDRYDHHQKGFEEVFGHGFSTKLSSAGLVYKHFGKEIIAKELKVDEENQDVHQIYLAVYKSFMEAIDAIDNGINRYDTDQPPKYVNNTHLSSRVGRLNLDWTDPDQSAEKENEAFQRAMALAGSEFLDSVRFHVKSWLPARSIVMETLAARQTVDPSGEILVLTKFCPWKLHLFELEGELKTDPPIKYVLYQDERSKQWRVQAVAVSPDSFDSRKALPLQWRGLRDEELSKEAGIPGCVFVHMSGFIGGNQNFDGALAMARAALKM

SEQ ID NO: 2572 - protein, 366 aa, Phaseolus vulgaris
MWAVTTKPFLKSHFLKLTLPFLLMANQPSLSFSSGSPVHASLKRVGTHNGSFHCDEALGCFMIRLTHKFNNAEIVRSRDPLVLEALDAVLDVGGVYDPSRDRYDHHQKGFEEVFGHGFSTKLSSAGLVYKHFGKEIIAKELKVDEEHKDVHHIYLAVYKSFMEAIDAIDNGINRYDTDQPPKYVNNTHLSSRVGRLNLDWTDPDQSAAKENEAFQRAMALAGSEFLDSVRFHVKSWLPARSIVMETVAARHTFDPSGEILVLTKFCPWKLHLFELEGELKIDPPIKYVLYQDERSKQWRVQAVAVSPDSFESRKALPSQWRGLRDEELSKEVGIPGCVFVHMSGFIGGNQNFDGALAMARAALKIM

SEQ ID NO: 2573 - protein, 364 aa, Cajanus cajan
MWAAATNPFIKFQFQRHTLPFLLMASSSLSFSTASPAHAPLKRVGTHHGSFHCDEALGCFMIRLTQRFNNAQIVRTRDPQVLGGLDAVFDVGGVYDPAQDRYDHHQKGFAEVFGHGFSTKLSSAGLVYKHFGKEIIAKELKVDEEHRDVHHIYLAVYKSFMEAIDAIDNGINQYDTDQPPKYVNNTHLSSRVGRLNLDWTDPDQSPEKENEAFQRAMALAGSEFLDSVRYHVNSWLPARSIVMETILARQTVDPTGEILVLTKFCPWKLHLFELEGEMKIDPPIKYVLYQDERSKSWRVQAVAVSPDRFESRKALPSQWRGLRDEELSKESGIPGCVFVHMSGFIGGNQTFDGALDMARAALKV

SEQ ID NO: 2574 - protein, 407 aa, Glycine max
MHPRPFLFSSRFFFFFFFFFFMVKLKPYSILVLREKSGMWAAATKPFVQFQFRRHTTTSLLPILLMANQASLSFSSGSPVHAPLKRVGTHNGSFHCDEALGCFMIRLTNKFNSAEIVRSRDPQVLEDLDAVLDVGGVYDPARDRYDHHQKGFEEVFGHGFSTKLSSAGLVYKHFGKEIIAKELKVDEEHRDVHYIYLAVYKSFMEAIDAIDNGINRYDTDQPPRYVNNTHLSSRVGRLNLDWTDPDQSPEKENEAFQRAMALAGSEFLDSVRFHVNSWLPARSIVMETLEARHTVDPSGEILVLTKLCPWKLHLFELEGELKNDPSVKYVLYQDERSKQWRVQAVAVSPDSFQSRKALPSQWQGLRDEELSKESGIPGCVFVHMSGFIGGNKNFDGALAMAKAALTM

SEQ ID NO: 2575 - protein, 371 aa, Trifolium pratense
STTTTKTSFLFNNFHFNKHLTLPIRLLMSNSKTARVSDSSSPSSHASLKRVGTHNGSFHCDEALGCFMIRLTRKFFNAEIVRTRDPQVLEGLDAVLDVGGVYDPARDRYDHHQKGFEEVFGHGFSTKLSSAGLVYKHFGKEIIANELKVDEEHQDVNYVYLAVYRSFMEAIDAVDNGINQYDTDQPPKYVNNTHLSSRVGRFNLDWTDPDQSSEKENEAFHRAMALAGSEFLDSVRFHVNSWLPARSIVMETVAARQTVDPSGEILVLKKFCPWKLHLFELEGELKIDPPIKYVLYQDERSKQWRVQAVSVSPDRFESRKALPSQWRGLRDDVLSKEADIPGCVFVHMSGFIGGNQTFEGALAMAKAALKM

SEQ ID NO: 2576 - protein, 380 aa, Trifolium pratense
MWAISSTKTLLLFNNFNFHKQKKNNNNHFTLSIRLLMSNSKTARVSDSSSPSSHASLKRVGTHNGSFHCDEALGCFMIRLTRKFLNAEIVRTRDPQVLEGLDAVLDVGGVYDPARDRYDHHQKGFEEVFGHGFSTKLSSAGLVYKHFGKEIIANELKVDEEHQDVNYVYLAVYRSFMEAIDAVDNGINQYDTDQPPKYVNNTHLSSRVGRFNLDWTDPDQSSEKENEAFHRAMALAGSEFLDSVRFHVNSWLPARSIVMETVAARQTVDPSGEILVLKKFCPWKLHLFELEGELKIDPPIKYVLYQDERSKQWRVQAVSVSPDRFESRKALPSQWRGLRDDILSKEAGIPGCVFVHMSGFIGGNQTFEGALAMAKAALKM

SEQ ID NO: 2577 - protein, 371 aa, Lupinus angustifolius
MLMLGVAIIKATKPLFFNFFHFQRHPFLPLMATSYSSSPSHSPLHAPFKRVGTHNGSFHCDEALGCFMIRLTHKFSNAEIIRTRDPKVLEGLDAVLDVGGVYDPSRDRYDHHQKGFGEVFGHGFSTKLSSAGLVYKHFGKEIIANQLRVNEEHPDVHHIFLAVYRSFMEAIDAIDNGINQYDTDQSPKYVNNTHLSSRVGRLNLDWTDLDQSPEKENESFQRAMALAGSEFLDSVRFHVGSWLPARSIVKETLLARQTVDPSGEVLVLNKFCPWKLHLFELEGELKIDPPIKYVLYEDERSKQWRVQAVSVSPDRFESRKALPSQWRGLRDDELSNEAGIPGCVFVHMSGFIGGNQNFDGALAMAKAALKI

SEQ ID NO: 2578 - protein, 380 aa, Trifolium pratense
MWAISSTKTLLLFNNFNFHKQKKNNNNHFTLSIRLLMSNSKTARVSDSSSPSSHASLKRVGTHNGSFHCDEALGCFMIRLTRKFFNAEIVRTRDPQVLEGLDAVLDVGGVYDPARDRYDHHQKGFEEVFGHGFSTKLSSAGLVYKHFGKEIIANELKVDEEHQDVNYVYLAVYRSFMEAIDAVDNGINQYDTDQPPKYVNNTHLSSRVGRFNLDWTDPDQSSEKENEAFHRAMALAGSEFLDSVRFHVNSWLPARSIVMETVAARQTVDPSGEILVLKKFCPWKLHLFELEGELKIDPPIKYVLYQDERSKQWRVQAVSVSPDRFESRKALPSQWRGLRDDVLSKEADIPGCVFVHMSGFIGGNQTFEGALAMAKAALKM

SEQ ID NO: 2579 - protein, 372 aa, Trigonella foenum-graecum
KTLLFNKFQFHFHFPKYKQKHLTLQLRLMSNAKTARVSDSSSPSSHASLKRVGTHNGSFHCDEALGCFMIRLTRKFFNAEIVRTRDPQVLEGLDAVLDVGGVYDPARDRYDHHQKGFEEVFGHGFSTKLSSAGLVYKHFGKEIIANELKVDEEHQNVHYIYLAVYRSFMEAIDAVDNGINQYDTDQPPKYVNNTHLSSRVGRFNLDWTDPDQSSEKENEAFHRAMALAGCEFLDSLRFHVNSWLPARSIVMETVAARRTVDPSGEIIVLKKFCPWKLHLFELEGEMKTDPPIKYVLYQDERSKQWRVQAVSVSPDRFESRKALPSQWRGLRDDVLSKESGVPGCVFVHMSGFIGGNQTFEGALAMAKAALKM

SEQ ID NO: 2580 - protein, 378 aa, Medicago truncatula
MWVTTSTTTKTLLFNKFNFHFSKYKQKHFTLQLRLMSNAKTARVSDSSSPSHASLKRVGTHNGSFHCDEALGCFMIRLTRNFFNAQIVRTRDPQVLEGLDAVLDVGGVYDPSRDRYDHHQKGFEEVFGHGFSTKLSSAGLVYKHFGKEIIANELKVDEEHQNVHYIYLAVYRSFMEAIDAVDNGINQYDTDQPPKYVNNTHLSSRVGRFNLDWTDPDQSSEKENEAFHRAMALAGSEFLDSVRFHVNSWLPAKSIVMETIAARQTVDPSGEILVLKRFCPWKLHLFELEGEMKIDPPIKYVLYEDERSKQWRVQAVSVSPDRFESRKALPSQWRGLRDDILSKESGIPGCVFVHMSGFIGGNQTFEGALAMAKAALKM

SEQ ID NO: 2581 - protein, 386 aa, Cicer arietinum
MWAAVTTTKTLFNNFHFHFHKQNHKHWNFTIPILLLMSNPTTARVSASFSSSPSPASPLHASLKRVGTHNGSFHCDEALGCFMIRLTRKFFDAEIVRTRDAQVLESLDAVLDVGGVYDPARDRYDHHQKGFEEVFGHGFSTKLSSAGLVYKHFGKEIIANELKVDEEHQDVHYIYLAVYRSFMEAIDAVDNGINQYDTDQPPKYVNNTHLSSRVGRFNLDWTDADQSSEKENEAFHRAMALAGSEFMDSVRFHVNSWLPARSIVMETVAARQTVDPSGEILVLNKFCPWKLHLFEIEGQMKIDPPIKYVLYQDERSKQWRVQAVSVSPDRFESRKALPLQWRGLRDDVLSKEAGIPGCVFVHMSGFIGGNQTFEGALAMAKAALKI

SEQ ID NO: 2582 - protein, 686 aa, Phaseolus vulgaris
MATQVTPVAAFLLLLLILPFSTSISHSHRSAAINLFATSPASLEDAYEALRVFEIIGFEEKKTHVSGDTCQKVLENLNSASPLKDLFYALKVNAILKCDVNREALKDIASRLKATVHDASTLLDIYYSIGGLVLIKDQDSNVDPYLAHVDGVFQSIKALSQSDGRWRYSSDNPESSTFAAGLAIEALAGVISLASSEIDQSKVNIVKKDIVKLFDFIEKYDDGTFYFDEKFVGGDEQRGSLAATSSVVRGFTAFAAVTSGEINLPGDKILGLAKFFLGIGIPGDAKDFFNQVESLAFLETNRISIPLILSLPETVYSLTKKGQLKVKVNTVLGSAAPPLTVKLARAFRTGAKDSAIIDSKELWYDQESGFHVLDAFPKNVEVGTYVFVFEIVLHDSGSEKVYATGGQIHVPIYVTGFIKVSNAEITVVDSDLGRAQSQKKLDLAGNDAVSLSANHLQKLKFSFQLTTPNGHVFKPHQAFLKLRHETKIEHIFVVGNTGKKFEIILDFLGLVEKLFYLSGRYDIELTVGDAVMENSFLRLLGHLDLNLPEAPEKAARPPSPPVDPYSRYGPKEEITHIFRVHEKRPPQNLSLIFLGLILLPIIGFLVGLLRLGVNLKNFPGSTVPATFGILFHVGIAGVLLLYVLFWLKLDLFTTLKAFGLLGAILMFVGHRILSHLALTSAKLKSA

SEQ ID NO: 2583 - protein, 686 aa, Cicer arietinum
MATTVVGAAFLLLLLLPFSISQPISDSHRSAASDLFNKISPSLEDAYEALRVFEILAIEKKPPVTTDTCHTVLENLGSSSSPLKDLFYALKVSGILKCDVDGAVLKKIASRLKATVHDASTLLDIYYSVGSLVLIKDQDSNVDVLLTDADEIFRSIKALSQSDGRWRYSSNNPESSTYAAGLALEALAGVISLASSEIDQSKVSIVKNDIAKLFDRIEKYDDGAYYFDEKFVSGSEHQDSLSTTSSVVRGVTSFAAVTSGRINLPGDTILGLAKFFLGIGIPGDTKDFFNQVESLSFLESNRISIPLILSLPETVYSLTKKGQLKVKVNTVLGSAAPPLTVKLIRAFSTGAKDSAIIDSKELQYNQNGGFHFLDAFPKNVDVGTYVFVFEIVLHDSDSEKIYVAGGQIHVPIYVTGIIKVGSAEIAVLDSDLGNVETHKTLDLAGNDVVSLSANHLQKLRLSFELESPRGRLFKPHQAFLKLTHETKIEHIFLVGNTGKKFENVFDFLGLVEKLFYLSGRYEIELTVGDAVMENSFSRLLGHVELDLPEAPEKAARPPSPPVDPYSRYGPKAEINHIFRVPEKRPHQKLSLVFLGLILLPFIGFLVGLLRLGVNLKNFPGSTVPATFGFLFHLGLAAVLLLYVLFWLKLDLFTTLKTLGLLGAFTMFVGHRILSHLALTSSKLKSA

SEQ ID NO: 2584 - protein, 689 aa, Trigonella foenum-graecum
MATTAVGAAAFLLLLLLPFSISISQPISDSHRSAASNLFTEISPSLEDSYEALRVFEILSIEKKPIVTKDTCHKVLENLVSLSSPLKDVFYALKVNGILKCDVDAAVFKGIASRLKATVNDASNLLDLYYSVGSLVLIKDQDSNVDVLLTDANGVFHSIKALSQSDGRWRYSSDNPESSIHAAGLALEALAGVISLASSEIGQSKVSIVNNGIVKLFDSIEKYDDGAFYFDEKIVRGSEHQGSLSTTSSVVRGVTSFAAVTSGKINVQGDIILGLAKFFLGIGIPGEAKDFFNQVESLSFLESNRISIPLILSLPETVYSLTKKGQLKVKVNTVLGSAAPPLTVKLVRAFSTGAKDSAIIESKELQYDQESGFHFLDSFPKNVDVGTYVFVLEIVLHGSESDKVYVTGGQIHVPIYVTGIIKVGSAEIAVLDSDLGNVETHKTLDLAGNDVVSLSATHLQKLRLSFQLETPHGHVFKPHQAFLTLRHETKIEHVFLVGNTGKKFENKFDFLGLVEKLFYLSGKYDIELTVGDAVMENSFSRLLGHVELDLPEAPEKAARPPAPPVDPYSRYGPKAEINHIFRTPEKRPPQKLSLVFLGLILLPFIGFLVGLLRLGVNLKNFPSSTVPATFATLFHLGLAAILLLYVLFWLKLDLFTTLKTLGLLGAFTMIIGHRILSHLASTSTKLKSA

SEQ ID NO: 2585 - protein, 689 aa, Medicago truncatula
MATTAVGAAAFLLLLLLPFSFSISPPISDSHRSAASNLFTQVSPSLEDSYEALRVFEILSIQKKPIVTKDTCQKVLENLGSSSSPLKDAFYALKVNGILKCKVDAAIFKDIASRLKATVNDASNLLDIYYSVGILVLIKDQASNVDVLLTDANGVFHSIKALSQSDGKWRYSSNNPESSIHAAGLALEALAGVVSLASSEIDQSKVSIVNNGIVKLFDSIEKYDDGAFYFDEKTVRGSEHQGSLSATSSVVRGVTAFAAVTSGKINVPRDTILGLAKFFLGIGIPGDAKDFFHQVESLSFLESNRISIPLILSLPETVYSLTKKGQLKVKVNTVLGSAAPPLTVKLVRASSTGAKDSAIIESKELQYDQKSGFHFLDSFPNNVDVGTYVFVFEIVLQDSESDKVYATGGQIHVPIYITGIIKVGSAEIAVLDSDLGNVETHKTLDLAGNDVVSLSATHLQKLRLSFQLETPHGRVFKPHQAFLTLRHETKIEHVFLVGNTGKKFEIKFDFLGLVEKLFYLSGKYDIELTVGDAVMENSFSRLLGHVELDLPEAPEKAARPPAPPVDPYSRYGPKAEINHIFRAPEKRPPQKLSLVFLGLILLPFIGFLVGLLRLGVNLKNFPGSTVPATFATLFHLGLAAILLLYVLFWLKLDLFTTLKTLGLLGAFTMIVGHRILSHLASTSAKLKSA

SEQ ID NO: 2586 - protein, 687 aa, Trifolium pratense
MATTAVGAAFLLLLLLPFSISIPQPISDSHRSAASNLFNQISPSLEDAYEALRVFEILAIEKKPLDTADTCKKVLENLGSSSPLKDVFYALKVNGILKCNIDGTIFKDIASRLKATLHDASTLLDIYYSVGSLVLIKDQASDVDVLLTDANGIFHSIKALSQSDGRWRYSSDNPESSTYASGLALEGLSGVISLASSEIDQSKVSIVKNGIVKLFDSIEKYDDGAFYFDEKFVRGSEPQGSLSTTSSVVRGVNAFAAVTSGKINLPGDTILGLAKFFLSIGIPGDAKDFFNQVESLSFLDSNRISIPLILSLPETVYSLTKKGQFKVKVSTVFGSAAPPLTVKLVRAFSTGAKDSAIIDSKELQYNQESGFHFLDSFPKNVDVGTYVFVLEIVLHDSESENVYATGGQIHVPIYVIGVIKVGNAEIAVLDSDLGNVETHKTLELAGNDIVSLSANHLQKLRLSFQLETPNGRVFKPHQAFLKLHHETKIEHIFLVGNTGKKFEIIFDFLGLVEKLFYLSGKYDIELTVGDAVMENSFSRLLGHVELDLPEAPEKAARPPLPPVDPYSRYGPNAEINHIFRAPEKRPPQKLSLVFLGLILLPFIGFLVGLLRLGVNLKNFPGSTVPATFATLFHLGLAAVLLLYVLFWLKLDLFTTLKTLGLLGVFTMFFGHRILSYLALTSTKLKSA

SEQ ID NO: 2587 - protein, 689 aa, Trifolium pratense
MATTAVGAAFLLLLFLPFSISIPQPISDSHRSAASKLFSHISPSLEDAYEALRVFEILAIQKKPLDTADTCKKVLENLGSSSSSPLKDVFYALKVNGVLKCNVDAAIFKDIASRLKATANDASTLLDIYYSVGSLVLIKDQTSDVDVLLTDANGIFHSIKALSQNDGRWRYSSDNPESSTYAAGLALEALSGVISLASSEIDQSKVSIVKNGIVKLFDSIEKYDDGAYYFDEKFVRGSEPQGSLSTTSSVVRGVNAFAAVTSGKINLSGDTILGLAKFFLGIGIPGDAKDFFNQVESLSFLDSNRISIPLILSLPETVYSLTKKGQLKVKVSTVLGSAAPPLTVKLVRAFSTGAKDSAIIDSKELQYNQESGFHFLDSFPKNVDVGTYVFVLEIVLHDFESEKVYATGGQIHVPIYVTGIIKVGNAEIAVLDSDLGNVETHKTLELAGNDIVSLSANHLQKLRLSFQLETPNGRVLKPHQAFLKLQHETKIEHIFLVGNTGKNIEIVFDFLGLVEKLFYLSGKYDIELTVGDAVMENSFSRLLGHVELDLPEAPEKAARPPLPPVDPYSRYGPKAEINHIFRAPEKRPPQKLSLVFLGLIVLPFIGFLVGLLRLGVNLKNFPGSTVPATFATLFHLGLAAVLLLYVLFWLKLDLFTTLKTLGLLGVFTMFFGHRILSYLALTSSKLKSA

SEQ ID NO: 2588 - protein, 692 aa, Lupinus angustifolius
MAKISVPHFLLLLLSFSICIAAKIYQPISDSHRSLASDLFTSTDPSYPSLEAAYEALRVFEVLEIEKKTQVSTTSCPKVLENLGSSSPLKDLYYALKVNAILKCKVDAKVLKDVASRLKATVKDASTLLDIYYSIGSLVLIKNQDSNVDVLLADADGTFHSIKALSQSDGRWRYSSDNPKSSTYAAGLALEALAGVISLASSEIDQSKVNTVKNDISKLFDTIEKYDDGTFYFDEKFVDGHEHQGSLSTTSSVVRGVTAFAAAIAGKINLPREKILGLAKFILGIGIPGDAKDLFNQVESLAFLESNRISIPLILSLPETVYSLTKKDQLKVRVTTALGSTAPPLTVKLVRAFSTGAKDSAIIESKELRYDQKSGLHVLDSFPKNVDVGAYVFVFEIVLLDSDSKKDYATGGQIHVPIYVTGIIEVSNAEIAILDSDLGSVETRKTLDLAGNDVVSLSANHLQKLRFSFQLTTPHGHVFKPHQAFLKLRHETEVEHIFVVGNTNKKFEIVLDFLGLVEKLFYLSGKYDIELTVGDAVMENSFLRLLGHVELDFPEAPEKASRPPPPAVDPYSRYGPKAEIAHIFRVPEKRPPQNLSLVFLGLILLPFVGFLIGLLRLGVNLKNFPSSTVPATFAILFQLGIGAVLLLYVLFWLKLDLFTTLKTLGFLGAFLLFVGHSTLSHLASTSAKLKSA

SEQ ID NO: 2589 - protein, 688 aa, Trifolium pratense
MATTAVGAAFLLLLLFLPFSISIPQPISDSHRSAASKLFSHISPSLEDAYETLRVFEILAIQKKPLDTADTCKKVLENLGSSSPLKDVFYALKVNGILKCNVDAAIFKDIASRLKATVNDASTLLDIYYSVGSLVLIKDQTSDVDVLLTDANGIFHSIKALSQNDGRWRYSSDNPESSTYAAGLALEALSAVISLASSEIDQSKVSIVKNGIVKLFDSIEKYDDGAYYFDEKFVRGSEPQGSLSTTSSVVRGVNAFAAVTSGKINLSGDTILGLAKFFLGIGIPGDAKDFFNQVESLSFLDSNRISIPLILSLPETVYSLTKKGQFKVKVSTVFGSAAPPLTVKLVRAFSTGAKDSAIIDSKELQYNQESGFHFLDSFPKNVDVGTYVFVLEIVLHDSESEKVYATGGQIHVPIYVIGVIKVGNAEIAVLDSDLGNVETHKTLELAGNDIVSLSANHLQKLRLSFQLETPNGRVFKPHQAFLKLQHETKIEHIFLVGNTGKNFEIVFDFLGLVEKLFYLSGKYDIELTVGDAVMENSFSRLLGHVELDLPEAPEKAARPPLPPVDPYSRYGPKAEINHIFRVPEKRPPQKLSLVFLGLILLPFIGFLVGLLRLGVNLKNFPGSTVPATFATLFHLGLAAVLLLYVLFWLKLDLFTTLKTLGLLGVFTMFFGHRILSYLALTSSKLKSA

SEQ ID NO: 2590 - protein, 377 aa, Glycine max
MPRSRGSELPQRQSPRGAHQHRTSSSDSDPLHHRPIADRSPKLGDRRSPRGTQSEGLNQKKLGTRIADLESQLGQAQVELKVLKDQLASAEAAKKEAQDELVKKAVQSVVPVVEKLQEKSTSKNAPETNKTESKSQDIIPDDNQQETDVFEVPIEKLTIEFSKPADQSEKETQPSEDSNAPAISKPSVDEHELTLKNDEIALLKTGLEEKGKELESMTNEKENLKNQLNEAVSKVSAAQTKEEEMTLQLNQLREELEASKANGDKLDEKLKSMEARKEGLESEMKKLRVQTEQWRKAADAAAAVLAGGVDMSARIPERCGSMDKHFGGTFETPAGRYNGYVGSPGMADVLDDGFGGGKRKGSGIRMFGDLWKKKSQK

SEQ ID NO: 2591 - protein, 375 aa, Cajanus cajan
MPRSRGSDLPQRQSPRGPHQLRTSSSDSDPLHHRPIADRSPKLGERRSPRGTQSEALNQKKLGTRIADLESQLGQAQEELKVLKDQLVSAEAAKKEAQDELVKKAVQSVVVEKFQEKCTSKNAQETNKTETKPQQIVPDDNQQETDVFEVPIEKLTIEFIKPADKSEKETQPFEDSNAPAVSKPSVEEHELTLKNDEIALLKSSLEEKGKELESMSNEKENLKNQLNAAVSKVSAAETKEEGMTLQLKQLREELEASKVNADKLDEKLKSVEAEKEGLESEMKKLRVQTEQWRKAADAAAAVLAGGVDMSARIPERCGSMDKHFGGTFETPAGRYNGYVGSPGMADDLDDGFGSGKRKGSGIRMFGDLWKKRSQK

SEQ ID NO: 2592 - protein, 380 aa, Phaseolus vulgaris
MPRSRGSDLPQRQSPRGPHQLRTSSSDSDPLHHRPIADRSPKLGDRRSPRGTQSEALNQKKLGTRIADLESQLGQAQEELKVLKDQLVSAEAAKKEAQDELVKKAVQSVVPVVEKFQEKCTSKNDQESNKTETKSQDVISYDNQQETDVFEVPIEKLAIEFGKPADQSEKETLSFEDSNEPAISMPEKPSVDEHELSLKNDEIALLKSSLEEKGKELESITNAKENLKNQLDEAVSKVSAAQSKEEGMTLQLDQLREELEASKANADKLNGKLKSVEAEKDGLESEMKKLRVQTEQWRKAADAAAAVLAGGVDMSARIPERCGSMDKHFGGTFETPAGRYNGYVGSPGMADDLDEGFGGGKRKGSGIRMFGDLWKKKSQK

SEQ ID NO: 2593 - protein, 381 aa, Vigna unguiculata
MPRSRGSDLPQRQSPRGPHQLRTSSSDSDPLHHRLIADRSPKLGDRRSPRGTQSEALNQKKLGTRIADLESQLGQAQEELKVLKDQLVSAEAAKKEAQDELVKKAVQSVVPVVEKFQEKCTSKNDQESNKTETKPQDIIIPDDNQHETDVFEVPIEKLTIKFDKPADQSEKETLAFEDSNAPAISMKEKPSVEEHELSLKIGEIALLKSSLEEKEKELESITNEKEDLKKKLDEAVSKVSTAESKEEGMSLVLDRLREELEASKGNAEKLNGKLKCVEAEKEGLEAEMKKLRVQTEQWRKAADAAAAVLAGGVDMTARIPERCGSMDKHFGGTFETPGGRYSGYVGSPGNADDLDDGFGGGKRKGSGIRMFGDLWKKKSQK

SEQ ID NO: 2594 - protein, 539 aa, Glycine max
MAAVRSSSVRRLGSTIQGSFNMELVQHCHYHHSMCMNLARLPSDSLSHPYYKRELQFAKNRFSNLASESLGSSHHFGTRASVSVKPTFSGYCFRSALPFASMSHVLNHRMYSSSVGDKGSRDGGTEVSAGSGATDINTTGDSVVGGDWAERIKDAWKSVAEAASYAGGKVKETSDDLTPFAQQLLDSHPYLDKVVIPVAGTLTATILAWFLLPRILRKFHKYATQGPVSLLPASVSVEPVPYEKSFWGAMEDPVRYLVTFIAFSQIGVMVAPTTITSQYLAPLWRGAVIVSFVWFLHRWKTNIFARTLSSQSLLGLDKEKVLALDKISSIGLFVIGIMALAEACGVAVQSVVTVGGIGGVATAFAAKDILGNVFSGLSMQFSKPFSIGDTIKAGSIEGQVVEMGLTSTSLLSSEKFPVIVPNSFFSSQVIVNKSRAEYLAIITKIPLQTEDLSKIPPISDDVKSMLRSNAKVFLGKDVPYCFLSRIESSYAELTLGYNLKHMRKDELYSAEQDILLQAVQIIKNHGVALGSTWQDTSSK

SEQ ID NO: 2595 - protein, 540 aa, Phaseolus vulgaris
MAAVRASSVRRIGSTIKVSFNMELVQRCHYHHSVCVNLARLPSDSPSHPYYKRELQSAKNQFSNLASESFGSSHQFGTRANLSFKPAFSSYCFRSALPFASASHVLNRRSYSSTVGGDKGSRDAGTEVAAGSGASDMNTTGDSVVGGDWAERIKDALKSVVESASYAGEKVKATSDDLTPYAQQLLDSHPYLDKVVIPVGGTLTATLIAWFLMPMILRKFHRYAMQGPVSLLPASISGDPVPYEKSFWGAMEDPMRYLVTFMAFSQIGVMVAPTTITAEYLAPVWRGAVIVSFVWFLHRWKTNVFARTLTSQSLLGLDREKVLALDKISSIGLFVIGIMAFAEACGVAVQSIVTVGGIGGVATAFAAKDILGNVFSGLSMQFSKPFSIGDTIKAGSIEGQVVEMGLTTTSLLSSEKFPVIVPNSFFSSQVIVNKSRAEYRAIISKIPLQTEDLSKIPQISDDVKSMLRSNAKVFLGKDVPYCFLSRIESSFAELTLGYNLKHMRKDELYSAEQEILLLAVQIIKNHGVALGSTWQEMPSK

SEQ ID NO: 2596 - protein, 594 aa, Glycine max
MDVLSLQKLVKTAPSKALIIRINLVCLAIFLVVYATLLLRPSSSVYFENAASLVRCSLSECHHKGEKSTTMKAVLEEPQLKSRRAKQNATKIEVPSFFGEMGKGMKIGMVNMQEDDVSEWSTFGETSQVYFERVSHFFNWTDLFPEWIDEEEETDVPSCPEIPMPEFAAYEGMDVIVAKLPCKYPEEGWGRDVLRLQVHLIVANLAVKKGKRDWNWKTKVVLWSKCRPMLELFRCNDLVKQENEWWYYEVDVKRLEQKVSLPVGSCNLALPLWEQGIDKVYDTSNLEQSVQSEARAKREAYVTVLHSSEGYVCGAITLAQTLLQTGTKRDLVLLLDSSISVAKRRALELSGWKIRLITRIRNPRAENGTYNEYNYSKFRLWQLTDYERVIFIDADIIVLRNLDILFHFPQMSATGNDQSIFNSGIMVLEPSNCTFEILMSRRHDVVSYNGGDQGFLNEIFVWWHRLPRRVNYLKNFWANTTIEAGRKNAMFAAEPPKLYAIHYLGLKPWHCYKDYDCNWDVQDQRVYASDVAHRRWWKVHDAMDENLQKLCRLTRQRRMELNWERRKAGKLGLPDMHWKINVTDPRRAGSMLIG

SEQ ID NO: 2597 - protein, 594 aa, Phaseolus vulgaris
MEVSSLQKLVKTAPSKALVIRINLFCLAIFLVVYAALLLQPSSSVYFENAASLVRCSLRECHHKEEKGLKMKGVLEEPEVKQRMPKQNASKIEVPSFFGEMGKGVKMGMVNMHEDDVSEWSSLGETTQVYFERVSEFFNWTDLFPEWIDEEEESDVPSCPEIPMPDFAAYETMDVIIAKLPCKYPQEGWGRDVFRLQVHMIVANLVVKKGKKDWNWKTKVVLWSKCRPMMELFRCKDLVKQENEWWYYEVDVKWLEQKVSLPVGSCNLALPLWEQGIDKVYDTSNLEQSVQSEARAKREAYATVLHSSEGYVCGAIMLAQTLLRTGTKRDLVLLLDSSISAVKRRALELSGWKIRVITRIRNPRAENGTYNEYNYSKFRLWQLTEYERVIFIDADIIVLRSLDILFHFPQLSATGNDQSIFNSGIMVLEPSNCTFDVLMSRRHDVVSYNGGDQGFLNEIFVWWHRLPRRVNFLKNFWANTTLEASVKNAMFGAEPPKLYAIHYLGLKPWHCYRDYDCNWDVEDQRVYASDVAHRRWWKVHDSMDERLQRLCRLTRKRRTELNWERRKAGKLGLADMHWKINVTDPRRQGSLLMD

SEQ ID NO: 2598 - protein, 594 aa, Cajanus cajan
MEVLSLQKLVKTAPSKALVIRINLVCLAIFLVVYATLLLRPSSSVYFENAASLVRCSLRECHHKGEKSIKMKAVLEEPQLKLRMPRQNATKIEVPSFFVEMGRGMKMGMVNMHEDDVSEWSNLGETTHVYFERVSQFFNWTDLFPEWIDEEEESDVPSCPEIPMPEFATYEDMDVIVAKLPCKYPEEGWGRDVFRLQVHLIAANLAVKKGKKDWNWRLKVVLWSKCRPMLELFRCDDLVKHEGEWWYYEADVKRLEQKISLPVGSCNLALPLWEQGIDTVYDTSNLEESVRSEARAKREAYATVLHSSEGYVCGAITLAQTLLQSGTKRDLVLLLDSSYSAAKRRALELSGWQIRLITRIRNPRAENGTYNEYNYSKFRLWQLTDYHKVIFIDADIIVLRNLDILFHFPQMSATGNDQSIFNSGIMVLEPSNCTFDVLMARRYDVISYNGGDQGFLNEMFVWWHRLPRRVNFLKNFWANTTLEASVKNALFGAEPPKLYAIHYLGLKPWHCYRDYDCNWDVEDQRVYASDVAHRRWWKVHDAMDHRLQSLCRLTRNRRTELNWERRKARKLALPDMHWNINVTDPRRSGSLLMD

SEQ ID NO: 2599 - protein, 603 aa, Phaseolus vulgaris
MELRRRSSSTAAKASDALPLPLHLTNAFFFTLFFSVAYYLLNRWRDKITSSSPLHLLSLSDIAAIFALLASVIYLLGFFGIHFVQSFVVRPADDDEEPSECTSFDKVDGQENDVMMADSITKGAAQPSPLLCTEPVKLVACGVDNDIMVDSVTKGKRVIQPSFQNVKPMVKELVSSIDRVYHDEDDVFIGSVLNGTVPSYSLESRLGDCRRAAAIRREALQRTTGRSLGGLPLEGFDYDAILGQCCEMPVGYVQVPVGVAGPLLLDGAEYTVPMATTEGCLVASTNRGCKAIYASGGATSVILRDGMSRAPVVRFATAKRAAELKFFMEDTLNFDTLAVVFNKSSRFGRLQSIKCSIAGKNVYLRFTSSTGDAMGMNMVSKGVQNVLDFLQSDFPDMDVIGISGNYCSDKKPAAVNWIEGRGKSVVCEATIKEHIVKKVLKTNVAALVELNMLKNLAGSAVAGALGGYNAHASNIVSAIFISTGQDPAQNVESSHCITMMEAVNDGRDLHISVTMPSIEVGTVGGGTQLPSQSACLNLLGVKGASKDSPGSNSRLLATIVAGSVLAGELSLMSAIAAGQLVKSHMKYNRSNRDMSTVSSRQES

SEQ ID NO: 2600 - protein, 340 aa, Panax ginseng
MEENWLCQWTVIRSILAIVQWWGFNVTVIIMNKWIFQKLDFKFPLSVSCIHFICSAIGAYLVIKVLKLKPLIVVEPEDRWRRIFPMSFVFCINIVLGNVSLRYIPVSFMQTIKSFTPATTVLLQWVVWRKYFDWRIWASLVPIVGGILLTSITELSFNMLGFCAALFGCLATSTKTILAESLLHGYKFDSINTVYYMAPFATMILAGPALLLEGSGVLEWFRTCPSLFSSLIIIFGSGVMAFCLNFSIFYVIHSTTAVTFNVAGNLKVAVAVTCSWLIFRNPISAMNAVGCSVTLVGCTFYGYVRHLLSQQLPGTPRTPRTPRNRIELTPLIIDKLDDKV

SEQ ID NO: 2601 - protein, 340 aa, Solanum phureja
MEEGRLCQWTVIRSVLAILQWWGFNVTVIIMNKWIFQKMDFKFPLTVSCIHFICSAIGAYTVIKVLKLKPLIVVDPEDRWRRIFPMSFVFCINIVLGNVSLRYIPVSFMQTIKSFTPATTVILQWLVWSKHFDLRIWASLIPIVGGILLTSITELSFNTFGFCAALFGCLATSTKTILAESLLHGYKFDSINTVYYMAPFATMILALPALLLEGSGVVAWLQTDPPFLSSFCIIFGSGVLAFCLNFSIFYVIHSTTAVTFNVAGNLKVAVAVTCSWLIFRNPISMMNAVGCAITLVGCTFYGYVRHMLSQQTPGTPRTPRTPRKSMEFVPLVNEKLEDKV

SEQ ID NO: 2602 - protein, 340 aa, Solanum lycopersicum
MEESRLCQWTVIRSVLAILQWWGFNVTVIIMNKWIFQKMDFKFPLTVSCIHFICSAIGAYTVIKVLKLKPLIVVDPEDRWRRIFPMSFVFCINIVLGNVSLRYIPVSFMQTIKSFTPATTVILQWLVWSKHFDLRIWASLIPIVGGILLTSITELSFNTFGFCAALFGCLATSTKTILAESLLHGYKFDSINTVYYMAPFATMILALPALLLEGSGVVAWLQTDPPLLSSFFIIFGSGVLAFCLNFSIFYVIHSTTAVTFNVAGNLKVAVAVTCSWLIFRNPISMMNAVGCAITLVGCTFYGYVRHMLSQQTPGTPRTPRTPRKSMEFVPLVNEKLEDKV

SEQ ID NO: 2603 - protein, 340 aa, Olea europaea
MEESGLCHWSVIRSILAIVQWWGFNVAVIIMNKWIFQKLDFKFPLSVSCIHFICSAIGAYLVIKVLKLKPLIPVNPEDHWRRIFPMSFVFCINIVLGNVSLRYIPVSFMQTIKSFTPATTVFLQWLVWGKYFDSRIWASLIPIVGGILLTSITELSFNTFGFCAALFGCLATSTKTILAESLLHGYKFDSINTVYYMAPFATMILAVPALLLEGSGVIEWFHTCPSLFSSLIIIFGSGVLAFCLNFSIFYVIHSTTAVTFNVAGNLKVAVAVTCSWLIFRNPISYLNAIGCAITLVGCTFYGYVRHKLSQQSPGTPLSPRTPRGKMELIPLVNEKLDDKV

SEQ ID NO: 2604 - protein, 340 aa, Solanum melongena
MEESRLCQWTVIRSILAILQWWGFNVTVIIMNKWIFQKMDFKFPLTVSSIHFICSAIGAYMVIKVLKLKPLIVVDPEDRWRRIFPMSFVFCINIVLGNVSLRYIPVSFMQTIKSFTPATTVILQWLVWSKHFDLRIWVSLIPIVGGILLTSITELSFNMFGFCAALFGCLATSTKTILAESLLHGYKFDSINTVYYMAPFATMILALPALLLEGPGVMAWLQTDPPLLSSFFIIFGSGVLAFCLNFSIFYVIHSTTAVTFNVAGNLKVAVAVTCSWLIFRNPISLMNAVGCAITLVGCTFYGYVRHMLSQQTPGTPRTPRTPRKSMEFVPLVNEKLEDKV

SEQ ID NO: 2605 - protein, 340 aa, Nicotiana benthamiana
MEESRLCQWSVIRSVLAILQWWGFNVTVIIMNKWIFQKMDFKFPLTVSCIHFICSAIGAYLVIKVLKLKPLIVVDPEDRWRRIFPMSFVFCINIVLGNVSLRYIPVSFMQTIKSFTPATTVILQWLVWSKHFDMRIWASLIPIVGGILLTSITELSFNMFGFCAALFGCLATSTKTILAESLLHGYKFDSINTVYYMAPFATMILAVPALLLEGPGVVAWLQMGPPLISSFCIIFGSGVLAFCLNFSIFYVIHSTTAVTFNVAGNLKVAVAVTCSWLIFRNPISMMNAVGCAITLIGCTFYGYVRHMLSQQTPGTPCTPRTPRKSMEFVPLVNEKLEDKV

SEQ ID NO: 2606 - protein, 337 aa, Sesamum indicum
MEDGRLCQWTVVRSILAILQWWGFNVTVIIMNKWIFQKLDFKYPLSVSCIHFISSSIGAYLVIKVLKLKPLITVDPEDRWRRIFPMSFIFCINIVLGNVSLRYIPVSFMQTIKSFTPATTVILQWLIWKKYFDWRIWASLIPIVGGILLTSITELSFNMLGFCAALFGCLATSTKTILAESLLHGYKFDSINTVYYMAPFATMILAVPALLLEGSGVMEWIYTCPSLFTSLVIIFGSGVLAFCLNFSIFYVIHSTTAVTFNVAGNLKVAVAVTCSWLIFRNPISLMNAVGCAITLVGCTFYGYVRHMLSHQTPGTPRTPRSKMELIPLTNDKLDDKV

SEQ ID NO: 2607 - protein, 340 aa, Nicotiana benthamiana
MEESRFCHWSVIRSVLAILQWWGFNVTVIIMNKWIFQKMDFKFPLTVSSIHFICSAIGAYLVIKVLKLKPLIVVDPEDRWRRIFPMSFVFCINIVLGNVSLRYIPVSFMQTIKSFTPATTVILQWLVWSKHFDMRIWASLIPIVGGILLTSITELSFNMFGFCAALFGCLATSTKTILAESLLHGYKFDSINTVYYMAPFATMILAVPALLLEGPGVVAWLQTGPPLLSSFCIIFGSGVLAFCLNFSIFYVIHSTTAVTFNVAGNLKVAVAVTCSWLIFRNPISMMNAIGCGITLIGCTFYGYVRHMLSQQTPGTPRTPRTPRKSMEFVPLVNEKLEDKV

SEQ ID NO: 2608 - protein, 340 aa, Prunus persica
MEETRLCQWSVIRSLLAILQWWGFNVTVIVMNKWIFQKLDFKFPLTVSCIHFICSAIGAYTVIKILKLKPLITVEPEDRWRRIFPMSFVFCINIVLGNVSLRYIPVSFMQTIKSFTPATTVVLQWLVWRKYFDWRIWCSLIPIVGGILLTSVTELSFNMLGFCAALFGCLATSTKTILAESLLHGYKFDSINTVYYMAPFATMILAVPAVVLEGNGVIEWLHTHQTLVPSLIIIFSSGVLAFCLNFSIFYVIHSTTAVTFNVAGNLKVAVAVLVSWMIFKNPIPALNAVGCGITLVGCTFYGYVRHLLSQQLPGTPRTPRTPRGRMELLPLVNDKLDDKV

SEQ ID NO: 2609 - protein, 340 aa, Prunus mume
MEETRLCQWSVIRSLLAIIQWWGFNVTVIVMNKWIFQKLDFKFPLTVSCIHFICSAIGAYTVIKILKLKPLITVEPEDRWRRIFPMSFVFCINIVLGNVSLRYIPVSFMQTIKSFTPATTVVLQWLVWRKYFDWRIWCSLIPIVGGILLTSVTELSFNMLGFCAALFGCLATSTKTILAESLLHGYKFDSINTVYYMAPFATMILAVPAVVLEGNGVIEWLHTHQTLVPSLIIIFSSGVLAFCLNFSIFYVIHSTTAVTFNVAGNLKVAVAVLVSWMIFKNPIPALNAVGCGITLVGCTFYGYVRHLLSQQLPGTPRTPRTPRGRMELLPLVNDKLDDKV

SEQ ID NO: 2610 - protein, 342 aa, Ricinus communis
MEESVLCQWSVFRSLLAIIQWWVFNVTVIIMNKWIFQKLDFKFPLTVSCVHFICSSIGAYLAIKVLKLKPLIVVDPEDRWRRIFPMSFVFCVNIVLGNVSLRYIPVSFMQTIKSFTPATTVVLQWLVWRKYFDWRIWASLVPIVGGILLTSVTELSFNMFGFCAALFGCLATSTKTILAESLLHGYKFDSINTVYYMAPFATMILGVPAMLLEGSGVVDWFYTHQSVGSSLIIIFSSGVLAFCLNFSIFYVIHSTTAVTFNVAGNLKVAVAVLVSWLIFRNPISAMNAVGCGITLVGCTFYGYVRHLLAQQPPPSGTPRTPRTPRNRMELLPLVNDKLDDKV

SEQ ID NO: 2611 - protein, 340 aa, Malus domestica
MEESWLCQWSVIRSLLAILQWWGFNVTVIVMNKWIFQKLDFKFPLTVSCIHFICSAIGAYIVIKVLKLKPLITVDPEDRWRRIFPMSFVFCINIVLGNVSLRYIPVSFMQTIKSFTPATTVVLQWLVWRKYFDWRIWCSLIPIVGGILLTSATELSFNMFGFCAALFGCLATSTKTILAESLLHGYKFDSINTVYYMAPFATMILAVPAMLLEGNGVIEWLHTHQTLVPSLVIIFSSGVLAFCLNFSIFYVIHSTTAVTFNVAGNLKVAVAVLVSWMIFKNPIPALNAVGCGITLLGCTFYGYVRHLISQQLPGTPRTPRTPRGRMELLPLVNDKLDDKV

SEQ ID NO: 2612 - protein, 340 aa, Centaurea maculosa
MEETRLCSWTVFRSIFAIFQWWSFNVAVIIMNKWIFQKLDFKFPLTVSCIHFICSSIGAYVVINVLKLKPLISVEPEDRWRRIFPMSFVFCINIVLGNVSLRYIPVSFMQTIKSFTPATTVILQWMVWRKYFDWRIWASLVPIVGGILLTSVTELSFNVLGFCAALFGCLATSTKTILAESLLHGYKFDSINTVYYMAPFATMILAVPALLLEGAGVLEWIQTAPNLGSSFVIIIGSGVLAFCLNFSIFYVIHSTTAVTFNVAGNLKVAFAVAFSWMIFKNPISAMNALGCAVTLVGCTFYGYVRHKLPIQLPGTPRTPRTPRSRLEMAPLVNDKIDDKV

SEQ ID NO: 2613 - protein, 340 aa, Capsicum annuum
MEESRLFQWSVIRSVLAILQWWGFNVTVIIMNKWIFQKMDFKFPLTVSCIHFICSAIGAYVVIKVLRLKPLIVVDPEDRWRRIFPMSFVFCINIVLGNVSLRYIPVSFMQTIKSFTPATTVILQWLVWSKHFDLRIWASLIPIVGGILLTSITELSFNVFGFCAALFGCLATSTKTILAESLLHGYKFDSINTVYYMAPFATMILAVPALLLEGPGIVGWLQTDPPLLSSFFIIFGSGVLAFCLNFSIFYVIHSTTAVTFNVAGNLKVAVAVTCSWLIFRNPISMMNAVGCAITLIGCTFYGYVRHMLSQQTPGTPRTPRTPRKSMEFVPLVNDKLEDKV

SEQ ID NO: 2614 - protein, 476 aa, Cajanus cajan
MKGYSVSWTKHKKEPYFAAHHRRRQHQCIQAHHDATEETTSPNHSFKLALSTSQNTLLPMLPALVAFLLLLTSIGTAFSHPIASNSPLPVLSHHNANHTLRPAAVLQKFRRIRAHLKKINKPAVKTIKSPDGDLIDCVLSHQQPAFDHPNLKGQRPLDPPERPKGHHTNGETAIESFQLWTDSGEVCPEGTVPIRRTTEQDFLRASSIRRFGRKPRRGVRRDSTGTGHEHAVVSVNGDQYYGAKASINVWTPSVTDPYEFSLSQIWVIAGSFGNDLNTIEAGWQVSPELYGDNYPRFFTYWTTDAYQATGCYNLLCSGFVQTNNRIAIGAAISPRSIYNGRQFDIGLMVWKDPKHGHWWLEFGSGLLVGYWPAYLFSHLRSHASMVQFGGEIVNSRSRGYHTGTQMGSGHFAEEGFRKAAYFRNLQVVDWDNNLLPLSNIHQVADHSNCYDIRVGSNNVWGTYFYYGGPGRNVRCP

SEQ ID NO: 2615 - protein, 486 aa, Glycine max
MDMKKGYSVSLTKQQHKKEPFFAVHHTRKQHQCIQANHDATEETSSQQNQYSLKLALSSTSQNTTLLLPAFVTLLLLVTSIGTAFSHPTIVSNSSSPLPPALSHSNANNQTLRPAAVLQKLRRIRTHLDKINKPAVKTIKSPDGDLIDCVLSHQQPAFDHPQLKGQRPLDPPERPKGHTNGETVVESFQLWTDSGEACPEGTVPIRRTTEQDFLRASSVRRFGRKPRNVRRDSTGIGHEHAVVSVNGDQYFGAKASINVWTPSVTDPYEFSLSQIWVIAGSFGNDLNTIEAGWQVSPELYGDNYPRFFTYWTTDAYQATGCYNLLCSGFVQTNNRIAIGAAISPRSIYNGRQFDIGLMVWKDPKHGHWWLEFGSGLLVGYWPAYLFSHLRNHASMVQFGGEIVNSRSRGYHTGTQMGSGHFAGEGFRKAAYFRNLQVVDWDNNLLPLSNIHQLADHSNCYDIRVGSNNVWGTYFYYGGPGRNVRCP

SEQ ID NO: 2616 - protein, 485 aa, Glycine max
MDMKGYSVSWTKQHQKELFFAAHHTTRQHQCIQANHDATEETSSQQQNQYSLKLALSSTSQNTMLHAFVALLLLVTSIGTAFSHPTIASNSSSTLPAALSHFHANNNTLRPSAVLQKLRRIRAHLNKSNKPAVKTIKSPDGDLIDCVLSHQQPAFDHPQLKGQRPLDPPERPKGHTHTNGETVIESFQLWTDSGEACPEGTVPIRRTTEQDFLRASSVRRFGRKPRNVRRDSTGTGHEHAVVSVNGDQYYGAKASINVWTPSVTDPYEFSLSQIWVIAGSFGNDLNTIEAGWQVSPELYGDNYPRFFTYWTTDAYQATGCYNLLCSGFVQTNNRIAIGAAISPRSIYNGRQFDIGLMVWKDPKHGHWWLEFGSGLLVGYWPAYLFSHLRNHASMVQFGGEIVNSRSRGYHTGTQMGSGHFSGEGFRKAAYFRNLQVVDWDNNLLPLSNIHQLADHSNCYDIRMGSNSVWGTYFYYGGPGRNVRCP

SEQ ID NO: 2617 - protein, 478 aa, Cicer arietinum
MDMKGYYSVSWTKKYMKDSFFSAQTTKRQHQCKQENHVVVSEPTTTSLNHSLNLAASSQNTLPPMLLHLFVTLLLFLTSISPILSHTIVSDSHSHPNANQTFRPSVALHKLKRIRTHLKKINKPAIKTIKSPDGDLIDCIITHHQPAFDHPQLQGQKPLDPPERPKGYHNNNGENVTHNFQLWTDSGEICPEGTIPIRRTTEQDFLRASSIRRFGRKPRGVRRDSTGTGHEHAVVFVNGEQYYGAKASINVWTPRVTDQYEFSLSQIWVIAGSFGNDLNTIEAGWQVSPELYGDNYPRFFTYWTTDAYQATGCYNLLCSGFIQTNNRIAIGAAISPRSTYNERQFDIGLMVWKDPKHGHWWLEFGSGLLVGYWPANLFSHLRSHASMVQFGGEIVNSRSRGYHTGTQMGSGHFSGEGFRKAAYFRNLQVVDWDNNLLPLSNIHQLADHSNCYDIKEGRNNVWGTYFYYGGPGRNVRCP

SEQ ID NO: 2618 - protein, 481 aa, Medicago truncatula
MDMKGYYSVSWTNKYMKDSFFSFQLTRRQHQCKQENHVVSEQTTTSLNHSLKLSSSTSLNTLSPILHLFVTLLLFFTSISPILSHPIVSNSTSSQVQSHSKANQTFRPDVALHKLKRIRAHLKKINKLPVKTIKSPDGDLIDCIISHQQPAFDHPLLKGQKPLDPPERPKGYNKNGENATNNFQLWIDSGEECPKGTVPIRRTTEQDFLRASSIRRFGRKPRGVRRDSTGNGHEHAVVFVNGEQYYGAKASINVWTPRVTDQYEFSLSQIWVIAGSFGNDLNTLEAGWQVSPELYGDNYPRFFTYWTTDAYQATGCYNLLCSGFIQTNNRIAIGAAISPRSFYSGRQFDIGLMIWKDPKHGHWWLEFGSGLLVGYWPANLFSHLRSHASMVQFGGEIVNSRSRGYHTGTQMGSGHFSGEGFRKAAYFRNLQVVDWDNNLLPLSNIHQLADHSNCYDVKEGRNNVWGTYFYYGGPGRNVRCP

SEQ ID NO: 2619 - protein, 487 aa, Glycine max
MSFREESGDARDLQKPFLHTGSWYKMGSRQSSIMGSSTHVIRDGAVSVLFCVLIVALGPIQFGFTCGYSSPTQGAIVRDLNLSISEFSFFGSLSNVGAMVGAIASGQIAEYIGRKGSLMIAAIPNIIGWLAISFAKDSSFLYMGRLLEGFGVGIISYVVPVYIAEIAPQHLRGGLGSVNQLSITIGIMLAYLLGLFVNWRVLAILGILPCTVLIPGLFFIPESPRWLAKMGMTDEFETSLQVLRGFDTDISVEVYEIKRSVASTGKRATIRFADLKRKRYWFPLMVGIGLLVLQQLSGINGVLFYSTTIFANAGISSSEAATVGLGAVQVIATGISTWLVDKSGRRLLLMISSSVMTVSLLIVSIAFYLEGVVSEDSHLFSMLGIVSVVGLVVMVIGFSLGLGPIPWLIMSEILPVNIKGLAGSIATMGNWLISWVITMTANLLLNWNSGGTFTIYTVVAAFTIAFIALWVPETKGRTLEEIQFSFR

SEQ ID NO: 2620 - protein, 487 aa, Cajanus cajan
MSFREESGDARDLQKPFLHTGSWYKMGSRQSSIMGSSTQVIRDGAVSVLFCVLIVALGPIQFGFTCGYSSPTQEAIVRDLKLSVSEFSLFGSLSNVGAMVGAIASGQIAEYVGRKGSLMIASIPNIIGWLAISFAKDSSFLFMGRLLEGFGVGIISYVVPVYIAEIAPQNLRGGLGSVNQLSVTIGILLAYLLGLFVNWRVLAILGILPCTVLIPGLFFIPESPRWLAKMGMTDEFETSLQVLRGFDTDISVEVHEIKRSVASTGKRAAIRFADLQRKRYWFPLMVGIGLLVFQQLSGINGVLFYSTTIFANAGISSSNVATVGLGAIQVIATGIATWLVDKSGRRLLLIISSSIMTVSLLIVSVAFYLEGVVSEDSHLYSIMGILSVVGLVVMVIGFSLGLGPIPWLIMSEILPVNIKGLAGSIATMGNWLISWVVTMTANLLLNWSSGGTFTIYTVVAAFSVAFVSLWVPETKGRTLEEIQFSFR

SEQ ID NO: 2621 - protein, 487 aa, Phaseolus vulgaris
MSFREEGGDARDLQKPFLHTGSWYKMGSRQSSIMGSSTQVIRDGAVSVLFCVLIVALGPIQFGFTCGYSSPTQGAIVRDLKLSVSEFSLFGSLSNVGAMVGAIASGQIAEYIGRKGSLMIAAIPNIIGWLSISFAKDSSFLFMGRLLEGFGVGIISYVVPVYIAEIAPQNMRGSLGSVNQLSVTIGILLAYLLGLFVNWRVLAILGVLPCTVLIPGLFFIPESPRWLAKMGMTDEFETSLQVLRGFDTDISVEVYEIKRSVASTGKRAAIRFADLKRKRYWFPLMVGIGLLVLQQLSGINGVLFYSTTIFANAGISSSDAATVGLGAIQVIATGISTWLVDKSGRRLLLIISSCIMTVSLVIVSTAFYLEGVVSEDSHLISILGTLSAVGLVVMVIGFSLGLGPIPWLIMSEILPVNIKGLAGSIATMGNWLIAWVVTMTANILLNWSSGGTFTIYAVIAAMTIAFIAKFVPETKGRTLEEIQFSFR

SEQ ID NO: 2622 - protein, 487 aa, Cicer arietinum
MSFREDSGDGRDLQKPFLHTGSWYKMGSRQSSVMGSTTQVIRDGSVSVLFCVLIAALGPIQFGFTCGYSSPTQQAIIKDLNLTVSEFSLFGSLSNVGAMVGAIASGQIAEYIGRKGSLMIAAIPNIIGWLAISFAKDSSFLFMGRLLEGFGVGIISYVVPVYIAEIAPENMRGSLGSVNQLSVTIGIMLAYLLGLFANWRVLAILGILPCTVLIPGLFFIPESPRWLAKMGMMDEFETSLQVLRGFDTDISVEVHEIKRAVASNGKRVTIRFADLKRKRYWFPLMVGIGLLVLQQLSGINGVLFYSTSIFANAGISSSNAATVGLGAIQVIATGIATWLVDKSGRRMLLIISSSLMTASLLVVSIAFYLEGVVSKDSPYFSILGIISVVGLVVMVIGFSLGLGPIPWLIMSEILPVNIKGLAGSIATMANWLVAWIITMTANLLLTWSSGGTFTIYTIVAAFTVAFTSMWVPETKGRTLEEIQFSLR

SEQ ID NO: 2623 - protein, 488 aa, Lotus japonicus
MSFREESGEGRGDLQKPFLHTGSWYKMGSRQSSVMGSTTQVMRDGSVSVLFCVLIAALGPIQFGFTCGYSSPTQDAIVSDLKLSLSEFSLFGSLSNVGAMVGAIASGQIAEYVGRKGSLMIAAIPNIIGWLAISFAKDYSFLYMGRLLEGFGVGIISYVVPVYIAEIAPENLRGGLGSVNQLSVTIGILLAYLLGLFVNWRVLAILGILPCTILIPGLFFIPESPRWLAKMGMTEEFESSLQVLRGFDTDISVEVHEIKRSIVPRGRRVAIRFADLQRKRYWFPLMVGIGLLVLQQLSGINGVLFYSTSIFANAGISSSSAATVGLGAIQVIATGISTWLVDKSGRRLLLLLSSSIMTVSLVVVSIAFYLEGTVSEDSHLYKILGIVSVVGLVVMVIGFSLGLGPIPWVIMSEILPVSIKGLAGSTATMANWLTSWAITMTANLLLTWSSGGTFTMYTVVAAFTVVFTALWVPETKGRTLEEIQSSFR

SEQ ID NO: 2624 - protein, 486 aa, Medicago truncatula
MSFREESGDGRDLQKPFLHTGSWYKMGSRQSSVMGSTTSVMRDSVSVLFCVLIAALGPIQFGFTCGYSSPTQQAIINDLKLSVSEFSLFGSLSNVGAMVGAIASGQIAEYVGRKGSLMIASIPNIIGWLAISFAKDSSFLFMGRLLEGFGVGIISYVVPVYIAEIAPENMRGSLGSVNQLSVTIGIMLAYLLGLFANWRVLAILGILPCTVLIPGLFFIPESPRWLAKMGMMEEFETSLQVLRGFDTDISVEVHEIKKAVASNGKRATIRFADLQRKRYWFPLSVGIGLLVLQQLSGINGVLFYSTSIFANAGISSSNAATVGLGAIQVIATGVATWLVDKSGRRVLLIISSSLMTASLLVVSIAFYLEGVVEKDSQYFSILGIISVVGLVVMVIGFSLGLGPIPWLIMSEILPVNIKGLAGSTATMANWLVAWIITMTANLLLTWSSGGTFLIYTVVAAFTVVFTSLWVPETKGRTLEEIQFSLR

SEQ ID NO: 2625 - protein, 487 aa, Trigonella foenum-graecum
MSFREESGDGRDLQKPFLHTGSWYKMGSRQSSVMGSTTSVMREGSVSVLFCVLIAALGPIQFGFTCGYSSPTQQAIINDLKLSVSEFSLFGSLSNVGAMVGAIASGQIAEYVGRKGSLMIASIPNIIGWLAISFAKDSSFLFMGRLLEGFGVGIISYVVPVYIAEIAPENMRGSLGSVNQLSVTIGIMLAYLLGLFANWRVLAILGILPCTILIPGLFFIPESPRWLAKMGMTEEFETSLQVLRGFDTDISVEVHEIKKAVASNGKRATIRFADLKRKRYWFPLSIGIGLLVLQQLSGINGVLFYSTNIFANAGISSSNAATVGLGAIQVIATGIATWLVDKSGRRVLLILSSSLMTASLLVVSIAFYLEGVVSKDSQYFSILGTISVVGLVVMVIGFSLGLGPIPWLIMSEILPVNIKGLAGSTATMANWLVAWIITMTANLLLTWSSGGTFLIYTVVAAFTVVFTSLWVPETKGRTLEEIQFSLR

SEQ ID NO: 2626 - protein, 487 aa, Arachis hypogaea
MSFRDEEAVGRDLQKPFLHTGSWYKMGSRTSSTMGSSAQVMRDGAVSVLFCVLVAALGPIQFGFTCGYSSPTQEAIIKDLKLSLSEFSVFGSLSNVGAMVGAIASGQIAEYIGRKGSLMIAAIPNIIGWLAISFAKDSSFLFMGRLLEGFGVGIISYVVPVYIAEIAPQNMRGSLGSVNQLSVTIGIMLAYLLGLFVNWRVLAILGILPCTVLIPGLFFIPESPRWLAKMGMTDEFETSLQVLRGFDTDISLEVQEIKRSVASSGKRVTIRFADLKRKRYWFPLTIGIGLLALQQLSGINGVLFYATIIFQNAGIQSSSAATVGLGAIQVIATGITTWLVDKSGRRLLLIISSSLMTVSLLVVSVAFYLEGVVSADSHLQNILATVSVVGLVVMVIGFSLGLGPIPWLIMSEILPVNIKSLAGSVATMTNWLTAWGITMTANLLLSWSSGGTFAIYMVVTAFTVFFTALWVPETKGRTLEEIQSSFR

SEQ ID NO: 2627 - protein, 487 aa, Lupinus angustifolius
MSFRDENSENKDLQKPFLHTGSWYKLGTRQSSMMNSSTQIIRDGSVSVLFCVLIAALGPIQFGFTCGYSSPTQQAIISDLKLSISEFSVFGSLSNVGAMVGAIASGQIAEYIGRKGSLMIASIPNIIGWLTISFANDSSFLFMGRLLEGFGVGIISYVVPVYIAEIAPQNMRGSLGSVNQLSVTIGIMLSYLLGLFVNWRVLAILGILPCTILIPGLFFIPESPRWLAKMGMTDEFETSLQVLRGFDTDISVEVHEIKRSVASTGKRTTIRFAELQRKRYWFPLMVGIGLLILQQLSGINGVLFYSSTIFANAGISSSNIATVGLGAIQVVATGVSTWLMDKSGRRLLLIISASIMSVSLLLTSIAFYLEGVVLKDSNLSNILAILSVVGVVVMVIGFSLGLGPIPWIIMSEILPVNIKGLAGSIATMANWLISWVITMTANLLLTWSSGGTFLIYTVVAAFTVAFVALWVPETKGRTLEEIQFSFR

SEQ ID NO: 2628 - protein, 488 aa, Trifolium pratense
GGGGGGGGGDGRDLQKPFLHTGSWYKMNSRQSSVMGSTTQIMRDGSVSVLFCVLIAALGPIQFGFTCGYSSPTQQAIIKDLNLTVSEFSLFGSLSNVGAMVGAIASGQIAEYVGRKGSLMIASIPNIIGWLAISFAKDSSFLFMGRLLEGFGVGIISYVVPVYIAEISPENMRGSLGSVNQLSVTIGIMLAYLLGLFANWRVLAILGVLPCTVLIPGLFFIPESPRWLAKMGLMDDFETSLQVLRGFDTDISVEVHEIKRAVASNGKRTTISFADLKRKRYWFPLSMGIGLLVLQQLSGINGVLFYSTSIFANAGISSSSAATVGLGAIQVIATGVATWLVDKSGRRVLLIISSSLMTASLLVVSVAFYLEEVVSKDSEYFSILGIISVVGLVVMVIGFSLGLGPIPWLIMSEILPVNIKGLAGSIATMANWLVAWIITMTANLLLTWSSGGTFTIYTIVSAFTVAFTALWVPETKGRTLEEIQFSLR

SEQ ID NO: 2629 - protein, 486 aa, Lupinus angustifolius
MSFREDNAENRELQKPFLHTGSWYKLGTRQSSMMSSTQVIRDGSVSILFCVLIAALGPIQFGFTCGYSSPTQQALISDLNLTISEFSLFGSLSNVGAMVGAIASGQIAEYIGRKGSLMIASIPNIIGWLAISFAKDSSFLFMGRLLEGFGVGIISYVVPVYIAEIAPQNMRGTLGSVNQLSVTIGIMIAYLLGLFVNWRVLAILGILPCTILIPGLFFIPESPRWLAKMGMTEEFETSLQVLRGFDTDISVEVHEIKRSVASTGKRATIRFADLKRKRYWFPLMVGIGLLILQQLSGANGVLFYSSTIFANAGISSSNIATFGLGAIQVLATGISTWLMDKSGRRVLLIISSSIMTVSLLLTSIAFYLEGIVPKDSALSNILALLSVVGVVVMVVGFSLGLGPIPWIIMSEILPVNIKSLAGSTATMANWLTSWVITMTANLLLTWSSGGTFLIYTVVAAFTVAFVALWVPETKGRTLEEIQFSFR

SEQ ID NO: 2630 - protein, 491 aa, Trifolium pratense
MSFREEAGGGGGDGRDLQKPFLHTGSWYKMNSRQSSVMGSTTQIMRDGSVSVLFCVLIAALGPIQFGFTCGYSSPTQQAIIKDLNLTVSEFSLFGSLSNVGAMVGAIASGQIAEYVGRKGSLMIASIPNIIGWLAISFAKDSSFLFMGRLLEGFGVGIISYVVPVYIAEIAPENMRGSLGSVNQLSVTIGIMLAYLLGLFANWRVLAILGVLPCTVLIPGLFFIPESPRWLAKMGLMDDFETSLQVLRGFDTDISVEVHEIKRAVASNGKRTTISFADLKRKRYWFPLSMGIGLLVLQQLSGINGVLFYSTSIFANAGISSSSAATVGLGAIQVIATGVATWLVDKSGRRVLLIISSSLMTASLFVVSIAFYLEGVVSKDSQYFSILGMISVVGLVVMVIGFSLGLGPIPWLIMSEILPVNIKGLAGSIATMANWLVAWIITMTANLLLTWSSGGTFTIYTIVAAFTVVFTSLWVPETKGRTLEEIQFSLR

SEQ ID NO: 2631 - protein, 489 aa, Cicer arietinum
MSFIREDCENGKELKKPFLNTGSWYRMGSNQSNILNSSTQYVMRDTSVSVLLCVLIVALGPLQFGFTCGYTSPTQESIISDLNLSLSQFSVFGSLSNVGAMVGAIASGQMAEYIGRKGSLMIAAIPNIIGWLAISFAEDSSFLFMGRFLEGFGVGIISYVVPVYIAEISPQNMRGTLGSVNQLSVTIGIMLAYLLGLFVNWRVLAVLGILPCTILIPGLFFIPESPRWLAKMRMTEEFETSLQVLRGFDTDISLEVNEIKRSVSSMGKGVTIQFADLKMKKYWFPLMVGIGLLVLQQLSGTNGVLFYSSTIFLNAGISSSNAATVGLGAIQVIVTGITTWLVDKSGRRLLLIISSSIMTGSLILVSLAFYLEGVTEKDSPLYSFLGILSVVGLVAMVIGYSLGLGPIPWLIMSEILPVNIKGLAGSIATLTNWMTSWIITMTANLLLTWSSGGTFTIYTVVAAFTIVFAAIWVPETKGRTLEEIQLSFR

SEQ ID NO: 2632 - protein, 486 aa, Vitis vinifera
MSFREEEDGRDLRKPFLHTGSWYRMGSRQSSIMGSSAQIIRDNSVSVLLCVLIVALGPIQFGFTCGYSSPTQSEIISDLGLSLSEFSIFGSLSNVGAMVGAIASGQIAEYIGRKGSLMIASIPNIIGWLAISFAQDSSFLYMGRLLEGFGVGVISYTVPVYIAEISPQNMRGGLGSVNQLSVTLGILLAYVLGLFVNWRVLAVLGILPCTILIPGLFFIPESPRWLAKMGMTEDFEASLQVLRGFDTDISVEVTEIKRSVASTGKRTTIQFSDLKRKRYWFPLMVGIGLLMLQQLSGINGVLFYSSNIFEAAGISSSDIATVGLGVIQVIATGVTTWLVDKAGRRLLLIVSSSGMTLSLLLVSVAFYLKDVISEDSRFYSILGILSLVGLVALVITFSLGVGAIPWVIMSEILPVSIKGLAGSIATLANWLTSWAVTMTANLLLSWSKGGTFAIYTLMTAFTIVFVTLWVPETKGRTLEEIQRSFR

SEQ ID NO: 2633 - protein, 481 aa, Quercus alba
MSFRDESEELKKPFLHTGSWYRMGSRQSSIMGSSAQIIRDGSISVLFCVLIVALGPIQFGFTCGYSSPTQAEIVKDLKLSVSEFSVFGSLSNVGAMIGAIASGQISEYIGRKGSLMIAAIPNIIGWLAISFAKDVSFLYMGRLLEGFGVGIISYTVPVYIAEISPQNMRGSLGSVNQLAVTTGIMLAYLLGLFVNWRMLAVLGILPCTILIPGLFFIPESPRWLAKMGMTEEFEASLQVLRGFDTDISIEVNEIKRSVASTSKRTTIRFSDLKRKRYWFPLTIGIGLLVLQQLSGINGVFFYSSNIFESAGLSSSNVATLGLGVIQVLATGITTWLVDKAGRKLLLIISSTGMTLSLLLVAIAFYLEDLVSEDSSIFGILSLVGLVALVISFSLGVGAIPWLIMSEILPVNIKGLAGSIATLANWLTSWVITMTANLLLTWSSGGTFTIYTLVSAFTVVFVSLWVPETKGRTLEEIQSSFR

SEQ ID NO: 2634 - protein, 486 aa, Euonymus alatus
MSFRDDSEDGRDLGKPFLHTGSWYRMSSRQSSMISSTQAIRESSISVVACVLIVALGPIQFGFTSGYSSPTQTAITKDLDLTVSEYSLFGSLSNVGAMVGAIASGQIAEYIGRKGSLMIAAIPNIIGWLAISFAKDSSFLYMGRLLEGFGVGIISYTVPVYIAEIAPQNMRGALGSVNQLSVTIGIMLAYLLGLFVQWRILAVLGILPCTVLIPGLFFIPESPRWLAKMGMTEDFEASLQVLRGFDTDISIEVNEIKRSVASTSKRSTIRFAELKRRRYWFPLMIGIGLLMLQQLSGINGVLFYSSTIFETAGISSSNVATFGLGAIQVIATGVSTWLVDKTGRRLLLIVSSCGMTFSLLVVAIAFYVKAFTSADSSLYSILGIISVVGVLGMVIAFSLGLGPIPWLIMSEILPVNIKGLAGSIATLGNWFISWVITMTANLLLDWSSGGTFTIYMIVSAFTVAFVTIWVPETKGRTLEEIQFSFR

SEQ ID NO: 2635 - protein, 486 aa, Tripterygium wilfordii
MSFRDDSDDGRDMRKPFLHTGSWYRMSSRQSSMMGSSQAIRESSISVVACVLIVALGPIQFGFTCGYSSPTQTAITKDLNLTVSEYSLFGSLSNVGAMVGAIASGQISEYIGRKGSLMIAAIPNIIGWLAISFSRDSSFLYMGRLLEGFGVGIISYTVPVYIAEIAPQNMRGALGSVNQLSVTIGIMLAYLLGLFVQWRILAVLGILPCTVLIPGLFFIPESPRWLAKMGMTEDFETSLQVLRGFDADISIEVNEIKRSVASTSKRTTIRFAELKRRRYWFPLMIGIGLLMLQQLSGINGVLFYSSTIFEAAGISSSNVATFGVGAIQVIATGVATWLVDKTGRRLLLIVSSSGMTFSLLIVAIAFYIKGFTSVDSSLYSILGIISVVGVVGMVISFSLGLGPIPWLIMSEILPVNIKGLAGSIATLANWFISWVVTMTANLLLDWSSGGTFTIYMIVSAFTVAFVTIWVPETKGRTLEEIQFSFR

SEQ ID NO: 2636 - protein, 480 aa, Castanea mollissima
MSFRDESEELKKPFLHTGSWYRMGSRQSSIMGSSAQMIRDGSISVVLCVLIVALGPIQFGFTCGYSSPTQAEIIEDLHLSISEFSVFGSLSNVGAMIGAIASGQIAEYIGRKGSLMIAAIPNIIGWLAISFAKDVSFLYMGRLLEGFGVGIISYTVPVYIAEISPQNMRGSLGSVNQLAVTTGIMLAYLLGLFVNWRVLAVLGILPCTILIPGLFFIPESPRWLAKMGMTEEFEASLQVLRGFDTDISTEVNEIKRSVASTSKRTTIRFSDLKRKRYWFPLTIGIGLLVLQQLSGINGVFSFSNIFASAGLSSSNVATLGLGVIQVLATGITTWLVDKAGRKLLLIISSTGMTLSLLLVAIAFYLEDIVSEDSSIFGILSLVGLVALVISFSLGVGAIPWLIMSEILPVNIKGLAGSIATLANWLTSWAITMTANLLLTWNSGGTFTIYTLVSAFTVVFVSLWVPETKGRTLEEIQSSFR

SEQ ID NO: 2637 - protein, 486 aa, Prunus persica
MSFRDDNEEGRDLRKPFLHTGSWYRMGSRQSSMMGSSQVIRDSSISVVACVMIVALGPIQFGFTSGYSSPTQSAIIKDLGLTVSEYSIFGSLSNVGAMVGAIASGQIAEYIGRKGSLMIAAIPNVIGWLAISFAKDSSFLYMGRLLEGFGVGIISYTVPVYIAEIAPQNLRGALGSVNQLSVTIGIMLAYLLGLLVQWRILAVLGILPCTILIPGLFFIPESPRWLAKMGMTEDFEASLQVLRGFDTDISVEVNEIKRSVASTTRRTTIRFAELKQKRYWLPLMIGIGLLVLQQLSGINGVLFYSSTIFATAGISSSNVATCGLGAVQVIATGVTTWLVDKSGRRLLLIISSAGMTVSLLIVAVAFFLKDLVATDSNLFSILGIITVVGVVAMVIFFSLGVGAIPWIIMSEILPINIKGLAGSIATLANWFISWVVTMTANLLLEWSSGGTFTIYMLVSAFTVVFVTIWVPETKGRTLEEIQFSFR

SEQ ID NO: 2638 - protein, 485 aa, Tripterygium wilfordii
SFRDDSEDVRDMGKPFLHTGSWYRMGSRQSSTMGSSQAIRESSISVVACVLIVALGPIQFGFTSGYSSPTQTAITKDLKLTVSEYSLFASLSNVGAMVGAISSGQIAEYIGRKGSLMIAAIPNIIGWLAISFARDSSFLYMGRLLEGFGVGIISYTVPVYIAEIAPQNMRGALGSVNQLSVTIGILLAYLLGLFVQWRILAVLGILPCLVLIPGLFFIPESPRWLAKMGMTEDFEASLQVLRGFDTDISIEVNEIKRSVASTSKRTTIRFAELKRRRYWFPLMIGIGLLMLQQLSGINGVLFYSSTIFEAAGISSSNVATCALGAIQVIATGVATWLVDKTGRRLLLIVSSSVMTFSLLIVAIAFYMKGFTSDDSSLYSILGIISIVGVVGMAIGFSLGLGPIPWLIMSEILPVNIKGLAGSIATLGNWFMSWVVTMTANLLLDWSSGGTFTIYMILSAFTVAFVTIWVPETKGRTLEEIQFSFR

SEQ ID NO: 2639 - protein, 489 aa, Medicago truncatula
MSLIREDYEDGNNLKKPFLNTGSWYRMGSKQTNILNSSTQYVMRDSSVSVLLCVLIVALGPLQFGFTCGYTSPTQESIISDLNLSLSEFSLFGSLSNVGAMVGAIASGQMAEYIGRKGSLIIAAIPNIIGWLAISFAQDSSFLFMGRFLEGFGVGIISYVVPVYIAEVSPQNMRGTLGSVNQLSVTIGILLAYLLGLFVNWRILAVLGILPCTILIPGLFFIPESPRWLAKMRMTEEFETSLQVLRGFDTDISLEVHEIKKSVESMGKGVTIQFADLKMKKYWFPLMVGIGLLVLQQLSGTNGVLFYSSTIFLNAGVSSSNAATVGLGIIQVIVTGITTWLVDKSGRRLLLIISSSIMTGSLFLVSIAFYFEGVTEKDSPLYSFLGILSVVGLVAMVIGYSLGLGPIPWLIMSEILPVNIKGLAGSIATLTNWLTSWIITMTANLLLTWSSGGTFLIYTVMAAFTVVFAAIWVPETKGRTLEEIQFSFR

SEQ ID NO: 2640 - protein, 492 aa, Chelidonium majus
MSFREDSEDGRGELRKPFLHTGSWYRMGSRQSSMIDKLGSSAQVIRDSSVSVVLCVLIVALGPIQFGFTGGYSSPTQDDIINDLGLTISEFSVFGSLSNVGAMVGAIASGQIAEYIGRKGSLMIASIPNIIGWLAISFAKDSSFLYMGRLLEGFGVGIISYVVPVYIAEIAPQDMRGSLGSVNQLSVTIGIMLAYLLGLFFSWRVLAVIGILPCTILIPGLFFIPESPRWLAKMGMMEDFEASLQVLRGFDTDISIEVNEIKRSVASSSTRRTAIRFTELKQRRYWFPLMVGIGLLVLQQLSGINGILFYSSNIFKAAGVSSSNAATFGLGAIQVIATGVTTWLVDKAGRRLLLIVSSSGMTASLLLVSIAFYLKEVIAKDSHFYSVLGILSLVGLVAFVVSFSLGVGAIPWVIMSEILPVNIKSLAGSIATLANWLTSWVITMTANLLLNWSNGGTFTIYTIVSAFTVAFVALWVPETKGRTLEEIQWSFR

SEQ ID NO: 2641 - protein, 483 aa, Euonymus alatus
MSSRDENEDLRKPFLHTGSWYRMSSRQSSSIMGSQLLRDGSISVVLCVLIVALGPIQFGFTCGYSSPTQSGIINDLNLSISEFSLFGSLSNVGAMVGAIASGQIAEYVGRKGSLMIAAIPNIIGWLAISFAKDSSFLYMGRLLEGFGVGIISYVVPVYIAEIAPQDMRGGLGSVNQLSVTIGIMLSYLLGLFVNWRVLAVLGILPCTILIPGLFFIPESPRWLAKMGMTEDFETSLQVLRGFDTDISVEVNEIKRSVASSSRKTTIRFADLKRKRYWYPLMVGIGLLMLQQLSGINGVLFYSSNIFASAGIKSSDAATFGLGAIQVIATGVTTWLVDKAGRRLLLVISTTGMTISLILVAVAFYLKGNLPEDSHLYNIMGILSLVGVVAMVIAFSLGVGALPWLIMSEILPVNIKGLAGSVATLTNWLSSWVVTLTANLLLTWSSGGTFTIYAAVSAFTVVFVTLWVPETKGRSLEEIQSSIR

SEQ ID NO: 2642 - protein, 487 aa, Theobroma cacao
MSFRDDNEEGRDLKKPFLHTGSWYRMSSRQSSVMGSSAQVLRDGSISVVLCVLIVALGPVQFGFTCGYSSPTQAQIINDLKLSISEYSIFGSLSNVGAMVGAIASGQIAEYIGRKGSLMIAAIPNIIGWLAISFAKDSSFLFMGRLLEGFGVGIISYTVPVYIAEISPQNMRGSLGSVNQLSVTIGIMLAYLLGLFANWRVLAVLGILPCTILIPGLFFIPESPRWLAKMGMMEDFEASLQVLRGFDTDISVEVHEIKRAVASSSKRTTIRFADLKRKRYWYPLMIGIGLLVLQQLSGINGVLFYSSNIFERAGVSSSNVATVGLGAIQVIATGVTTWLVDKAGRRLLLMVSSSGMTLSLLIVAVAFFVEGIVSQDSDLYSIMGILSLVGLVAFVISFSLGIGAIPWVIMSEILPINIKGLAGSVATLANWMTSWAITMTANLLLTWSGGGTFTLYAIVAAFTIVFVALWVPETKGRSLEEIQSSFR

SEQ ID NO: 2643 - protein, 486 aa, Ricinus communis
MTSREEAGDDGVRKPLLHTGSWYRMSSRQSSMMGSSSQYIRDGAVSVVLCVLIVALGPIQFGFTCGYSSPTQAEIIRDLNLSISEFSLFGSLSNVGAMVGAIASGQMAEYIGRKGSLMVAAIPNIIGWLSISFAKDSSFLFMGRLLEGFGVGIISYTVPVYIAEIAPQNRRGSLGSVNQLSVTLGIMLAYLLGLFVHWRLLAVLGILPCTILIPGLFFIPESPRWLAKMGMTEDFEASLQVLRGFDTDISAEVNEIKRSVASSTKRSTVRFADLRRRRYWFPLMVGIGLLMLQQLSGINGILFYSSNIFESAGLSSGNLATVGLGVIQVLATGVTTWLVDKAGRRLLLIVSTSGITVSLLLVAVAFYLEGNVSKDSHLYGIMGILSLVGLVAMIIFFSLGLGAIPWIIMSEILPVNIKGLAGSVATLANWLTSWLVTMTANLLLSWSSGGTFTMFTLVSAFTVVFVTLWVPETKGRTLEEIQSSFR

SEQ ID NO: 2644 - protein, 486 aa, Prunus mume
MSFRDDNEEGRDLRKPFLHTGSWYRMGSRQSSMMGSSQVIRDSSISVVACVLIVALGPIQFGFTSGYSSPTQAAIIKDLGLTVSEYSLFGSLSNVGAMVGAIASGQIAEYIGRKGSLMIAAIPNVIGWLAISFAKDSSFLYMGRLLEGFGVGIISYTVPVYIAEIAPQNLRGALGSINQLSVTIGIMLAYLLGLLVQWRILAVLGILPCTILIPGLFFIPESPRWLAKMGMTEDFEASLQVLRGFDTDISVEVNEIKRSVASTTRRTTIRFAQLKQKRYWLPLMIGIGLLVLQQLSGINGVLFYSSTIFATAGISSSNVATCGLGAVQVIATGVTTWLVDKAGRRLLLIISSAGMTVSLLVVAVAFFLKDLVATDSNIFSILGIITVVGVVAMVLFFSLGVGAIPWIIMSEILPINIKGLAGSIATLANWFVSWVVTMTANLLLEWSSGGTFTIYMLVSAFTVVFVTIWVPETKGRTLEEIQFSFR

SEQ ID NO: 2645 - protein, 795 aa, Trigonella foenum-graecum
MSLPTKRSGGATSSSPSSSTSMKKAKSSSTFDDVVFDSSMAPLDDDLKPTDLPRAAAAAGMAANLARKKATPPQPAKKLLIKLHKGNPTVPTNFEDKTWAILKSAICAIFLKQPDSCDLERLYQAVNDLCIHKMGGNLYQRIEKECEVHISAALQSLVGQSPDLIVFLSLVERCWQDLCDQMLMIRGIALFLDRTYVKQSPNIRSIWDMGLQIFRKHLSLSPEVQHKTVTGLLRMIDSERLGEAVDRTLLNHLLKMFTALGIYAESFEKPFLECTSEFYAAEGVKYMQQSDVPDYLKHVETRLQEEHERCLIYLDASTKKPLITTTEKQLLERHIPAILDKGFSMLMDGNRIEDLQRMHSLFSRVNALESLRHAISSYIRRTGQGIVMDEEKDKDMVQSLLEFKAALDTTWEDSFAKNESFSNTIKDAFEHLINLRQNRPAELIAKFLDDKLRAGNKGTSEEELEGTLDKVLVLFRFIQGKDVFEAFYKKDLAKRLLLGKSASIDAEKSMISKLKTECGSQFTNKLEGMFKDIELSKEINESFRQSSQARTKLPSGIEMSVHVLTTGYWPTYPPMDVRLPHELNVYQDIFKEFYLSKYSGRRLMWQNSLGHCVLKADFPKGKKELAVSLFQTVVLMQFNDAEKLSFQDIKDSTAIEDKELRRTLQSLACGKVRVLQKMPKGRDVEDNDSFVFNDTFTAPLYRIKVNAIQLKETVEENTHTTERVFQDRQYQVDAAIVRIMKTRKVLSHTLLITELFQQLKFPIKPADLKKRIESLIDREYLERDKSNPQVYNYLA

SEQ ID NO: 2646 - protein, 788 aa, Glycine max
MSLPTKRSGTAGSSPSPPPPMKKAKSLLLHSSSSSDAVLDPSSMPLDDDLPNARAANLARKKATPPQPAKKLLIKLHKAKPTLPTNFEEDTWAKLKSAIRAIFLKQPNSCDLEKLYQAVNDLCLYKMGGNLYQRIEKECEAHISAALQSLVGQSPDLVVFLSLVERCWQDLCDQMLMIRGIALFLDRTYVKQTANVRSLWDMGLQLFRKHLSLSPEVEHKTVTGLLRMIESERKGEAVDRTLLNHLLKMFTALGIYAESFEKPFLECTSEFYAAEGVKYMQQSDVPDYLKHVEIRLQEEHERCLIYLDASTRKPLIATAEKQLLERHIPAILDKGFAMLMDGNRIEDLQRMYLLFSRVNALESLRLAISSYIRRTGQGIVLDEEKDKDMVSSLLEFKASLDTTWEESFSKNEAFCNTIKDSFEHLINLRQNRPAELIAKFLDEKLRAGNKGTSEEELEGTLDKVLVLFRFIQGKDVFEAFYKKDLAKRLLLGKSASIDAEKSMISKLKTECGSQFTNKLEGMFKDIELSKEINESFKQSSQARTKLPSGIEMSVHVLTTGYWPTYPPMDVRLPHELNVYQDIFKEFYLSKYSGRRLMWQNSLGHCVLKAEFPKGKKELAVSLFQTVVLMLFNDAEKLSFQDIKDSTGIEGKELRRTLQSLACGKVRVLQKLPKGRDVEDDDSFVFNEGFTAPLYRIKVNAIQLKETVEENTSTTERVFQDRQYQVDAAIVRIMKTRKVLSHTLLITELFQQLKFPIKPADLKKRIESLIDREYLERDKNNPQIYNYLA

SEQ ID NO: 2647 - protein, 788 aa, Cicer arietinum
MSLPTKRSSGATSTSMKKFKSHSQQQHHDDAVLDPSSLSMPLDDDLKSNARSVMAANLSRKKATPPQPLKKLLIKFHKAKPTLPTNFEEETWANLKSAICAIFLKQPNSCEKENLYQAVSSLCSYKMGGNLYERIEKECEVHISAALQSLVGQSPDLVVFLYLVERCWQDLCDQMLMIRDIALYLDRTYVKQTPNVRSLWDMGLQLFRKHLSLSPEVQHKTVTGLLRLIESERLGEAVDRTLLNHLLKMFTALGIYAESFEKPFLECTSEFYATEGVKYMQQSDVPDYLKHVETRLQEEHERCLIYLDASTKKPLIATAEKQLLERHIPAILDKGFSMLMDGNRIEDLQRMYSLFSRVNALESLRQALSSYIRKTGQGIVMDEEKDKDMVSSLLEFKASLDLTWEESFVKNEAFSNTIKDAFEHLINLRQNRPAELIAKFLDDKLRAGNKGTSEEELEGTLDKVLVLFRFIQGKDVFEAFYKKDLAKRLLLGKSASIDAEKSMISKLKTECGSQFTNKLEGMFKDIELSKEINESFKQSSQARTKLPSGIEMSVHVLTTGYWPTYPPMDVRLPHELNVYQDIFKEFYLSKYSGRRLMWQNSLGHCVLKADFPKGKKELAVSLFQTVVLMLFNDAEKLSFQDMKDSTGIEDKELRRTLQSLACGKVRVLQKMPKGRDVDDDDSFVFNDTFTAPLYRIKVNAIQLKETVEENTSTTERVFQDRQYQVDAAIVRIMKTRKVLSHTLLITELFQQLKFPIKPADLKKRIESLIDREYLERDKGNPQVYNYLA

SEQ ID NO: 2648 - protein, 786 aa, Cajanus cajan
MSLPTKRSGTAGSSPSPPPPMKKAKSLLRPPSDDAVLDPSSMPLDEDLPNARAANLSRKKATPPQPAKKLLIKLHKAKPTLPTNFEEDTWAKLKSAICAIFLKQPNSCDLEKLYQAVNDLCLYKMGGNLYQRIEKECEAHISAALQSLVGQSPDLVVFLSLVERCWQDLCDQMLMIRGIALYLDRTYVKQTANVRSLWDMGLQLFRKHLSLSPEVEHKTVTGLLRMIESERKGEAVDRTLLNHLLKMFTALGIYAESFEKPFLECTSEFYAAEGVKYMQQSDVPDYLKHVETRLQEEHDRCLIYLDASTRKPLIATAEKQLLERHIPAILDKGFAMLMDGNRIEDLQRMYSLFSRVNALESLRQAISSYIRRTGQGIVLDEEKDKDMVSALLEFKASLDTTWEESFFKNEAFCNTIKDSFEHLINLRQNRPAELIAKFLDEKLRAGNKGTSEEELEGTLDKVLVLFRFIQGKDVFEAFYKKDLAKRLLLGKSASIDAEKSMISKLKTECGSQFTNKLEGMFKDIELSKEINESFKQSSQARTKLPSGIEMSVHVLTTGYWPTYPPMDVRLPHELNVYQDIFKEFYLSKYSGRRLMWQNSLGHCVLKAEFPKGKKELAVSLFQTVVLMLFNDAEKLSFQDIKDSTSIEDKELRRTLQSLACGKVRVLQKLPKGRDVEDDDSFVFNDGFTAPLYRIKVNAIQLKETVEENTSTTERVFQDRQYQVDAAIVRIMKTRKLLSHTILITELFQQLKFPIKPADLKKRIESLIDREYLERDKNNPQVYNYLA

SEQ ID NO: 2649 - protein, 787 aa, Phaseolus vulgaris
MSLPTKRSGTAGSSPSPPPPMKKAKSLLLRAPSDDAVLDSSPMPLDDDLPNARAANLSRKKATPPQPAKKLLIKLHKAKPTLPTNFEEDTWAKLKSAICAIFLKQPNSCDLEKLYQAVNDLCLYKMGGNLYQRIEKECESHISAALQSLVGQSPDLVVFLSLVERCWQDLCDQMLMIRGIALYLDRTYVKQTANVRSLWDMGLQLFRKHLSLSPEVEHKTVTGLLRMIESERKGEAVDRTLLNHLLKMFTALGIYAESFEKPFLECTSEFYAAEGVKYMQQSDVPDYLKHVEIRLQEEHERCLIYLDASTRKPLIATAEKQLLERHIPAILDKGFAMLMDGNRIEDLQRMYSLFLRVNALESLRQAISSYIRRTGQGIVMDEEKDKDMVSSLLEFKASLDTTWEESFSKNEAFCNTIKDSFEYLINLRQNRPAELIAKFLDEKLRAGNKGTSEEELEGTLDKVLVLFRFIQGKDVFEAFYKKDLAKRLLLGKSASIDAEKSMISKLKTECGSQFTNKLEGMFKDIELSKEINESFKQSSQARTKLPSGIEMSVHVLTTGYWPTYPPMDVRLPHELNVYQDIFKEFYLSKYSGRRLMWQNSLGHCVLKAEFPKGKKELAVSLFQTVVLMLFNDAEKLSFQDIKDSTSIEDKELRRTLQSLACGKVRVLQKLPKGRDVEDDDSFVFNEGFAAPLYRIKVNAIQLKETVEENTSTTERVFQDRQYQVDAAIVRIMKTRKVLSHTLLITELFQQLKFPIKPADLKKRIESLIDREYLERDKNNPQIYNYLA

SEQ ID NO: 2650 - protein, 755 aa, Trifolium pratense
SSLDHDLKPNPLSSSNSMAANLSRKKATPPQPSQPAKKLLIKLTKGKPKIPPNFEEQTWATLKSAICAIFFKQPNSCDLEKLYQAVEDLCIHKMGGNLYQRIEKECEVHISAALQSLVGQSPDLVVFLSLVERCWQDHCDQMLMIRDIALFLDRTYVKQNSSIRSLWDMGLQLFRKHLSLSPEVQHKTVTGLLRMIDSERLGEAVDRTLLNHLLKMFTALGIYAESFEKPFLDCTSEFYAAEGVKYMQQSDVPDYLKHVETRLQEEHERCLIYLDASTKKSLIQTTEAQLLERHIPAILDKGFSVLMDGNRIEDLQRMHSLFSRVNALESLKQALSSYIRRTGQGIVMDEEKDKDMVQSLLEFKAALDTTWEESFAKNEAFGNTIKDAFEHLINLRQNRPAELIAKFLDDKLRAGNKGTSEEELEGTLDKVLVLFRFIQGKDVFEAFYKKDLAKRLLLGKSASIDAEKSMISKLKTECGSQFTNKLEGMFKDIELSKEINESFRQSSQARTKLPSGIEMSVHVLTTGYWPTYPPMDVRLPHELNVYQDIFKEFYLSKYSGRRLMWQNSLGHCVLKADFPKGKKELAVSLFQTVVLMQFNDAEKLSFQDIKDSTAIEDKELRRTLQSLACGKVRVLQKMPKGRDVEDEDSFVFNDTFTAPLYRIKVNAIQLKETVEENTNTTERVFQDRQYQVDAAIVRIMKTRKVLSHTLLITELFQQLKFPIKPADLKKRIESLIDREYLERDKSNPQVYNYLA

SEQ ID NO: 2651 - protein, 803 aa, Lupinus angustifolius
MSLPTKRSSTTSSSSSSSAAAAATVNNPMKKAKPHAPLHDAVFDPSSMAIDDDLKPSLNESNAPSRGLVAANLARKKSTPPQPAKKLLIKLHKAKPTLPTNFEEDTWAKLKSAICAIFLKQPDSCDLELLYQAVSDLCLYKMGGNLYQRIEKECEAHISAALQSLVGQSPDLVVFLSLVERCWQDLCDQMLMIRGIALYLDRTYVKQTPNVRSLWDMGLQLFRKHLSLSSEVEHKTVTGLLRMIESERLGEAVDRTLLNHLLKMFTALGIYAESFEKPFLECTSEFYAAEGMKYMQQSDVPDYLKHVETRLQEEHERCLLYLDASTRKPLIATTEKQLLERHIPAILDKGFSMLMDGNRIEDLQRIYSLFSRISALESLRQALSSYIRKTGQGIVMDEEKEKDMVSSLLDFKASLDTIWEESFFKNEAFSNTIKEAFEHLINLRQNRPAELIAKFLDEKLRAGNKGTSEEELEGMLDKVLVLFRFIQGKDVFEAFYKKDLAKRLLLGKSASIDAEKSMISKLKTECGSQFTNKLEGMFKDIELSREINDSFKQSSQARSKLPSGIEMSVHVLTTGYWPTYPPMDVRHPHELNVYQDIFKEFYLSKYSGRRLMWQNSLGHCVLKAEFPKGKKELAVSLFQTVVLMLFNDAEKLSFQDIKDSTSIEDKELRRTLQSLACGKVRVLQKFPKSRDVEDNDSFVFNEGFTAPLYRIKVNAIQLKETVEENTSTTERVFQDRQYQIDAAIVRIMKTRKVLSHTLLITELFQQLKFPIKPADLKKRIESLIDREYLERDKSNPQIYNYLA

SEQ ID NO: 2652 - protein, 800 aa, Lupinus angustifolius
MSLPTKRSSTISSSSSDAAATNPMKKAKSHGPLDDTVFNPSSMAIDNDLKPSSDDATTAVPSRGLIAANLARKKATPPQPPKKLLIKLHKAKPTLPTNFEEDTWAKLKSAICAIFLKQPDSCDLELLYQAVSDLCLYKMGGNLYLRIEKECEAHISAALQSLIGQSPDLVVFLSLVERCWRDLCDQMLMIRGIALYLDRTYVKQTPNVRSLWDMGLQLFRKHLSLSSEVEHKTVTGLLRMIESERLGETVDRILLNHLLKMFTALGIYAESFEKPFLECTSEFYAAEGMKYMQQSDVPDYLKHVETRLQEEHERCLIYLDATTRKPLIATAENQLLERHIPAILDKGFPMLMDGNRIEDLQRMYSLFSRVNALESLRQALSSYIRKTGQGIVMDEEKDKDMVSSLLDFKASLDTIWEESFSKNEAFSNTIKEAFEHLINLRQNRPAELIAKFLDEKLRAGNKGTSEEELEGMLDKVLVLFRFIQGKDVFEAFYKKDLAKRLLLGKSASIDAEKSMISKLKTECGSQFTNKLEGMFKDIELSKEINESFKQSSQARTKLPSGIELSVHVLTTGYWPTYPPMDVRLPHELNVYQDIFKEFYLSKYSGRRLMWQNSLGHCVLKAEFPKGKKELAVSLFQTVVLMLFNDAEKLSFQDIKDSTSIEDKELRRTLQSLACGKVRVLQKFPKSRDVDDDDSFVFNEGFAAPLYRIKVNAIQLKETVEENTSTTERVFQDRQYQVDAAIVRIMKTRKVLSHTLLITELFQQLKFPIKPADLKKRIESLIDREYLERDKSNPQIYNYLA

SEQ ID NO: 2653 - protein, 787 aa, Theobroma cacao
MKKAKSQAVACSLDPNKNGLHHHHNQDDNDVVFDPSSMALDDDSKPDDARAPAAANLSRKKATPPQPAKKLVIKLVKAKPTLPTNFEEETWAKLKSAINAIFLKQPDSCDLEKLYQAVNNLCLHKMGGSLYQRIEKECEEHISAALRSLVGQSPDLVVFLSLVEKCWQDLCDQMLMIRGIALYLDRTYVKQTPNVRSLWDMGLQLFRKHLSLASEVEHKTVTGLLRMIESERLGEAVERTLLNHLLKMFTALGIYSESFEKPFLECTSEFYAAEGMKYMQQSDVPDYLKHVEMRLHEEHERCLLYLDALTRKPLIATAERQLLERHIPAILDKGFMMLMDGHRIEDLQRMYSLFSRVNALESLRQALSSYIRRTGQGIVLDEEKDKDMVPSLLEFKASLDSIWEESFSKNEAFCNTIKDAFEHLINLRQNRPAELIAKFLDEKLRAGNKGTSEEELEGTLDKVLVLFRFIQGKDVFEAFYKKDLAKRLLLGKSASIDAEKSMISKLKTECGSQFTNKLEGMFKDIELSKEINESFKQSSQARIKLPSGIEMSVHVLTTGYWPTYPPMDVRLPHELNVYQDIFKEFYLSKYSGRRLMWQNSLGHCVLKADFPKGKKELAVSLFQTVVLMLFNDAQKLSFQDIKDSTGIEDKELRRTLQSLACGKVRVLQKLPKGRDVEDDDSFVFNEGFTAPLYRLKVNAIQMKETVEENTSTTERVFQDRQYQVDAAIVRIMKTRKVLSHTLLITELFQQLKFPIKPADLKKRIESLIDREYLERDKNNPQIYNYLA

SEQ ID NO: 2654 - protein, 775 aa, Glycine max
MSNTKLSPPMKKAKSIDSKNDDAVLKSPAAASDDPNAPALVAANLSRKKATPPHPPKKLLIKFHKGIPTLPPNFEEDTWAKLKSAIGAIFLKQPVSCDLENLYQAVNDLCLYKMGGNLYQRIEKECEAHISAALQSLVGQSPDLIVFLSLVERCWQDLCDQMLMIRGIALFLDRTYVKQTTNVQSLWDMGLQLFCKYLSLSPEVEHKTVTGLLRMIGSERSGESVDRTLLNHLLKMFTALGIYAETFEKPFLECTSEFYAAEGMKYMQQSDAPDYLKHVETRLQEEHERCLLYLDASTRKPLIATAEKQLLERHIPAILDKGFTVLMDGNRIEDLQRMHSLFSRVNALESLKQALSSYIRRTGQGIVMDEEKDKDMVSSLLEFKASLDTIWEESFFKNEAFSNSIKDAFEYLINLRQNRPAELIAKFLDEKLRAGNKGTSEEELEATLDKVLVLFRFIQGKDVFEAFYKKDLAKRLLLGKSASIDAEKSMISKLKTECGSQFTNKLEGMFKDIELSKEINDSFKQSSQARSKLASGIEMSVHVLTTGHWPTYPPMDVRLPHELNVYQDIFKEFYLSKYSGRRLMWQNSLGHCVLKAEFPKGRKELAVSLFQTVVLMLFNDAEKLSLQDIKDATGIEDKELRRTLQSLACGKVRVLQKMPKGRDVEDDDLFVFNDGFTAPLYRIKVNAIQLKETVEENTSTTERVFHDRQYQIDAAIVRIMKTRKVLSHTLLITELFQQLKFPIKPADLKKRIESLIDREYLERDKSNPQIYNYLA

SEQ ID NO: 2655 - protein, 804 aa, Citrus sinensis
MSLPNKRTASNNNSNNYSPSAMKKAKSQAVACSVDTANKNGLHHDNDAVFDPSSISLDDDLKPDEPRQQAAANLSRKKAQPPQPAKKLVIKLLKAKPTLPTNFEEDTWAKLKLAIKAIFLKQPTSCDLEKLYQAVNDLCLHKMGGNLYQRIEKECEEHISAAIRSLVGQSPDLVVFLSLVERCWQDLCDQMLMIRGIALYLDRTYVKQTPNVRSLWDMGLQLFRKYLSSYSEVEHKTVTGLLRMIERERLGEAVDRTLLNHLLKMFTALGIYSESFEKPFLECTSEFYAAEGMKYMQQSDVPDYLKHVEIRLHEEHERCLLYLDVSTRKPLIATAERQLLERHISAILDKGFTMLMDGHRTEDLQRMYSLFSRVNALESLRQALAMYIRRTGHGIVMDEEKDKDMVSSLLEFKASLDTIWEQSFSKNEAFCNTIKDAFEYLINLRQNRPAELIAKFLDEKLRAGNKGTSEEELEGTLDKVLVLFRFIQGKDVFEAFYKKDLAKRLLLGKSASIDAEKSMISKLKTECGSQFTNKLEGMFKDIELSKEINESFKQSSQARTKLPSGIEMSVHVLTTGYWPTYPPMDVRLPHELNVYQDIFKEFYLSKYSGRRLMWQNSLGHCVLKAEFPKGKKELAVSLFQTVVLMLFNDAQKLSFQDIKDATGIEDKELRRTLQSLACGKVRVLQKLPKGRDVEDDDSFVFNEGFTAPLYRIKVNAIQMKETVEENTSTTERVFQDRQYQVDAAIVRIMKTRKVLSHTLLITELFQQLKFPIKPADLKKRIESLIDREYLERDKNNPQIYNYLA

SEQ ID NO: 2656 - protein, 804 aa, Citrus clementina
MSLPNKRTASNNNSNNYSPSAMKKAKSQAVACSVDTANKNGLHHDNDAVFDPSSISLDDDLKPDEPRQQAAANLSRKKAQPPQPAKKLVIKLLKAKPTLPTNFEEDTWAKLKLAIKAIFLKQPTSCDLEKLYQAVNDLCLHKMGGNLYQRIEKECEEHISAAIRSLVGQSPDLVVFLSLVERCWQDLCDQMLMIRGIALYLDRTYVKQTPNVRSLWDMGLQLFRKYLSSYSEVEHKTVTGLLRMIERERLGEAVDRTLLNHLLKMFTALGIYSESFEKPFLECTSEFYAAEGMKYMQQSDVPDYLKHVEIRLHEEHERCLLYLDVSTRKPLIATAERQLLERHISAILDKGFTMLMDGHRTEDLQRMYSLFSRVNALESLRQALAMYIRRTGHGIVMDEEKDKDMVSSLLEFKASLDTIWEQSFSKNEAFCNTIKDAFEYLINLRQNRPAELIAKFLDEKLRAGNKGTSEEELEGTLDKVLVLFRFIQGKDVFEAFYKKDLAKRLLLGKSASIDAEKSMISKLKTECGSQFTNKLEGMFKDIELSKEINESFKQSSQARTKLPSGIEMSVHVLTTGYWPTYPPMDVRLPHELNVYQDIFKEFYLSKYSGRRLMWQNSLGHCVLKAEFPKGKKELAVSLFQTVVLMLFNDAQKLSFQDIKDATGIEDKELRRTLQSLACGKVRVLQKLPKGRDVDDDDSFVFNEGFTAPLYRIKVNAIQMKETVEENTSTTERVFQDRQYQVDAAIVRIMKTRKVLSHTLLITELFQQLKFPIKPADLKKRIESLIDREYLERDKNNPQIYNYLA

SEQ ID NO: 2657 - protein, 814 aa, Gossypium hirsutum
MSLPPTKRSITNATASSSSSPHFQPPMKKAKSQAVACSLDPNRNGLHHHHNNQDDNNVLFDPSSMPLHDDSKSADARTPAAANLSRKKATPPQPAKKLVIKLVKAKPTLPTNFEVETWATLKSAIIAIFLKRPDSCDLEKLYQAVNDLCLHKMGGSLYQRIEKECEEHISSALRSLVGQSPDLVVFLSLVEKCWQDLCDQMLMIRGIALYLDRTYVKQTPNVRSLWDMGLQLFRKHLSMAPEVEHKTVTGLLRMIEGERLGEAVDRTLLNHLLKMFTALGIYSESFEKPFLECTSEFYAAEGMKYMQQSDVPDYLKHVEMRLHEEHERCVLYLDALTRKPLIATAEKQLLERHIPAILDKGFVMLMDGRRLEDLQRMYSLFSRVNALESLRQAISSYIRRTGQVIVMDEEKDKDMVPSLLEFKASLDSIWEESFSKNEAFGNTIKDSFEHLINLRQNRPAELIAKFLDEKLRAGNKGTSEEELEGTLDKALVLFRFIQGKDVFEAFYKKDLAKRLLLGKSASIDAEKSMITKLKTECGSQFTNKLEGMFKDIELSKEINESFKQSSQARTKLPSGIEMSVHVLTTGYWPTYPPMGVRLPHELNVYQDIFKEFYLSKYSGRRLMWQNSLGHCVLKADFPKGKKELAVSLFQTVVLMLFNDAQKLSFQDIKDSTGIEDKELRRTLQSLACGKVRVLQKLPKGRDVEDNDSFIFNDGFTAPLYRIKVNAIQMKETVEENTSTTERVFQDRQYQVDAAIVRIMKTRKVLSHTLLITELFQQLKFPIKPADLKKRIESLIDREYLERDKNNPQIYNYLA

SEQ ID NO: 2658 - protein, 797 aa, Quercus alba
MKKAKSQAAALDPKNGLHHQDFNNSNNNNSDVVFDPSSMSVDDDFKPHDSSAPSPSPAPPRAVAANLSRKKAQPPQPPKKLVIKLLKAKPTLPANFEEDTWAKLKSAISAIFLKQPDPIDSEILYQAVNDLCLHKLGGNLYQRIEKECEAHISEALQSLFGQSPDLVVFLSLVERCWQDLCDQMLLIRGIALYLDRTYVKQTPNVRSLWDMGLQLFRKHLSLSPEVEHKTVTGLLRMIQSERLGEAVDRTLLNHLLKMFTALGIYAESFEKPFLECTSEFYAAEGMKFMQQSDVPDYLKHVETRLHEEHERCVLYLDACTRKPLIATAEKQLLERHISAILDKGFMMLMDGHRIEDLQRMYSLFSRVNALESLRQALSSYIRRTGQGIVMDEEKDKDMVSSLLEFKASLDTIWEESYSKNDAFCNTIKDAFEHLINLRQNRPAELIAKFLDEKLRAGNKGTSEEELEGTLDKVLVLFRFIQGKDVFEAFYKKDLAKRLLLGKSASIDAEKSMISKLKTECGSQFTNKLEGMFKDIELSKEINESFKQSSQARTKLPSGIELSVHVLTTGYWPTYPPMDVRLPHELNVYQDIFKEFYLSKYSGRRLMWQNSLGHCVLKAEFPKGKKELAVSLFQTVVLMLFNDAERLSFQDIKDSTGIEDKELRRTLQSLACGKVRVLQKMPKGRDVEDDDSFVFNDVFTAPLYRIKVNAIQMKETVEENTSTTERVFQDRQYQVDAAIVRIMKTRKVLSHTLLITELFQQLKFPIKPADLKKRIESLIDREYLERDKNNPQIYNYLA

SEQ ID NO: 2659 - protein, 808 aa, Castanea mollissima
NPTSPPPFSAMKKAKSQAAALDPKNGLHHQDFNSNSNSNNNDVVFDPSSMSVDDDFKPHDSSAPSPSPTPPRSVAANLARKKSQPPQPTKKLVIKLLKAKPTLPANFEEDTWAKLKSAISAIFLKQPDPIDSEILYQAVNDLCLHKLGGNLYQRIEKECEAHISEALQSLFGQSPDLVVFLSLVERCWQDLCDQMLLIRGIALYLDRTYVKQTPNVRSLWDMGLQLFRKHLSLSPEVEHKTVTGLLRMIQSERLGEAVDRTLLNHLLKMFTALGIYAESFEKPFLECTSEFYAAEGMKFMQQSDVPDYLKHVETRLHEEHERCVLYLDACTRKPLIATAEKQLLERHISAILDKGFMMLMDGHRIEDLQRMYSLFSRVNALESLRQALSSYIRRTGQGIVMDEEKDKDMVSSLLEFKASLDTIWEESYSKNDAFCNTIKDAFEHLINLRQNRPAELIAKFLDEKLRAGNKGTSEEELEGTLDKVLVLFRFIQGKDVFEAFYKKDLAKRLLLGKSASIDAEKSMISKLKTECGSQFTNKLEGMFKDIELSKEINESFKQSSQARTKLPSGIELSVHVLTTGYWPTYPPMDVRLPHELNVYQDIFKEFYLSKYSGRRLMWQNSLGHCVLKAEFPKGKKELAVSLFQTVVLMLFNDAERLSFQDIKDSTGIEDKELRRTLQSLACGKVRVLQKMPKGRDVEDDDSFVFNDVFTAPLYRIKVNAIQMKETVEENTSTTERVFQDRQYQVDAAIVRIMKTRKVLSHTLLITELFQQLKFPIKPADLKKRIESLIDREYLERDKNNPQIYNYLA

SEQ ID NO: 2660 - protein, 819 aa, Arachis hypogaea
MSHPTKRSATASTDASSSSAAATATMKKAKSQAVACSLDSKNSLSHHHHHHHRQHPDDTLFDPAASPMALDDDLKSDDQNARGAVAANLSRKKATPPQPAKKLLIKLRKGKPTMPPNFEEDTWETVRSAISAIFLKQHLSCDLEKLYQAVSDMCLHKMGANLYQRIERECETHISAALQSLVGQSPDLVVFLSLVERCWQDLSDQMLMIRGIALYLDRTYVKQTTNVRSLWDMGLQLFRKHLSLCQEVEHKTVTGLLRMIESERLGEAVDRTLLNHLLKMFTALGIYAESFEKPFLECTSEFYAAEGMKYMQQSDAPDYLKHVETRLQEEHERCLLYLDASTRKALIATAEKQLLERHIPAILDKGFTMLMDANRIEDLQRMYTLFSRVNALESLRQALSSYIRRTGQGIVMDEEKDKDMVSSLLIFKASLDTIWEQSFFKNEAFSNTIKDAFEHLINIRQNRPAELIAKFLDEKLRAGNKGTSEEELEGTLDKVLVLFRFIQGKDVFEAFYKKDLAKRLLLGKSASIDAEKSMISKLKTECGSQFTNKLEGMFKDIELSKEINESFKQSSQARSKLPSGIEMSVHVLTTGYWPTYPPMDVRLPHELNVYQDIFKEFYLSKYSGRRLMWQNSLGHCVLKAEFPKGKKELAVSLFQTVVLMLFNDAEKLSFQDIKDATSIEDKELRRTLQSLACGKVRVLQKIPKGRDVEDDDSFVFNDTFMAPLYRIKVNAIQLKETVEENTSTTERVFQDRQYQVDAAIVRIMKTRKVLSHTLLITELFQQLKFPIKPADLKKRIESLIDREYLERDKNNPQIYNYLA

SEQ ID NO: 2661 - protein, 769 aa, Glycine max
MSNTKLSPPMKKAKSIDSKNAAASASDDPNAPALIAANLSRKKATPPHPPKKFLIRFHKGVPTLPPNFEEETWAKLKSAIGAIFMKQPVSCDLENLYQAVNDLCLYKMGGNLYQRITKECEEHISVALQSLVGQSPDLIVFLSLVERCWQDLCDQLLMIRGIALFLDRTYVKQTTNVRSLWDMGLQLFSKHLSLSSEVEHKTVTGLLRMIESERSGESVDRTLLNHLLKMFTALGIYVETFEKPFLECTSEFYAAEVMKYMQQSDAPDYLKHVETRLQEEHERCLLYLDASTRKPLIGIAEKQLLERHIPAILDKGFIMLMDGNRIEDLQRMHSLFSRVNALESLKQALSSYIRRTGQGIVMDEEKDKDMVSSLLEFKASLDTIWEESFFKNEPFSNSIKDAFEYLINLRQNRPAELIAKFLDEKLRAGNKGTSEEELEATLDKVLVLFRFIQGKDVFEAFYKKDLAKRLLLGKSASIDGEKSMISKLKTECGSQFTNKLEGMFKDIELSKEINESFKQSSQARSKLASGIEMSVHVLTTGYWPTYPPIDVRLPHELNVYQDIFKEFYLSKYSGRHLMWQNSLGHCVLKAEFPKGRKELAVSLFQTVVLMLFNDAEKLSLQDIKDATGIEDKELRRILQSLACGKVRVLQKMPKGRDVEDDDSFVFNDGFTAPLYRIKVNAIQLKETVEENTSTTERVFQDRQYQIDAALVRIMKTRKVLSHTLLITELFQQLKFPIKPADLKKRIESLIDREYLERDKSNPQIYNYLA

SEQ ID NO: 2662 - protein, 806 aa, Euphorbia peplus
MSLPTKRSLSASAASSSANFPPMKKAKSQAVSAAFDRNGLHHFNPSSTPENDVVFDPSSISLDDDSHRSPPPAANLSRKKATLPQPPKKFVIKLVKAKPTLPTNFEEDTWAKLQSAIKAIFLKQPDSCDLEKLYQAVNNLCLLKMGGNLYQRIEKECEAHISEALQSLVGQSPDLMVFLSLVERCWQDLCDQMLMIRGIALYLDRTYVKQTPNVRSLWDMGLQLFRKHLSLSPEVEHKTVTGLLRMIERERLGETVDRTLLNHLLKMFTALGIYAESFERQFLDGTSEFYAAEGTKYMQQSDVPDYLKHVEIRLHEEHERCLLYLDASTRKPLIATAERQLLERHISAILDKGFMILMDGHRIEDLKRMYSLFSRVNALESLRQALSSCIRKTGQGIVMDEEKDKDMVFSLLEFKASLDTIWEESFSKNEAFCNTIKDAFEHLINLRQNRPAELIAKFLDEKLRAGNKGTSEEELEGTLDKVLVLFRFIQGKDVFEAFYKKDLAKRLLLGKSASIDAEKSMISKLKTECGSQFTNKLEGMFKDIELSKEINESFKQSSQARTKLPSGIEMSVHVLTTGYWPTYPPMDVRLPHELNVYQDIFKEFYLSKYSGRRLMWQNSLGHCVLKAEFPKGKKELAVSLFQTVVLMLFNDAQKLSFQDIKDATSIEDKELRRTLQSLACGKVRVLQKIPKGRDVEDDDSFLFNDVFTAPLYRIRVNAIQMKETVEENTSTTERVFQDRQYQVDAAIVRIMKTRKVLSHTLLITELFQQLKFPIKPADLKKRIESLIDREYLERDKSNPQIYNYLA

SEQ ID NO: 2663 - protein, 816 aa, Gossypium raimondii
MSLPPTKRSITNVTASSSSSSSPHFQPPMKKAKSQAVACSLDPNRNGLHHHHNNQDDNNVLFDPSSMPLHDDSKSADARTPAAANLSRKKATPPQPAKKLVIKLVKAKPTLPTNFEVETWATLKSAITAIFLKRPDSCDLEKLYQAVNDLCLHKMGGSLYQRIEKECEEHISTALRSLVGQSPDLVVFLSLVEKCWQDLCDQMLMIRSIALYLDRTYVKQTPNVRSLWDMGLQLFRKHLSMAPEVEHKTVTGLLRMIEGERLGEAVDRTLLNHLLKMFTALGIYSESFEKPFLECTSEFYAAEGMKYMQQSDVPDYLKHVEMRLHEEHERCVLYLDALTRKPLIATAEKQLLERHIPAILDKGFVMLMDGRRLEDLQRMYSLFSRVNALESLRQAISSYIRRTGQVIVMDEEKDKDMVPSLLEFKASLDSIWEESFSKNEAFGNTIKDSFEHLINLRQNRPAELIAKFLDEKLRSGNKGTSEEELEGTLDKALVLFRFIQGKDVFEAFYKKDLAKRLLLGKSASIDAEKSMITKLKTECGSQFTNKLEGMFKDIELSKEINESFKQSSQARTKLPSGIEMSVHVLTTGYWPTYPPMGVRLPHELNVYQDIFKEFYLSKYSGRRLMWQNSLGHCVLKADFPKGKKELAVSLFQTVVLMLFNDAQKLSFQDIKDSTGIEDKELRRTLQSLACGKVRVLQKLPKGRDVEDNDSFIFNDGFTAPLYRIKVNAIQMKETVEENTSTTERVFQDRQYQVDAAIVRIMKTRKVLSHTLLITELFQQLKFPIKPADLKKRIESLIDREYLERDKNNPQIYNYLA

SEQ ID NO: 2664 - protein, 831 aa, Malus domestica
MSHPTKRSSAINHSSSGTSSSSSSSLNPSSAGPPMKKAKSQAVACSLDPSKNGLHHHHHHPHTHPTQDPDNDAVFDPSSMSLDDDLRPDDPSPRGVAANLSRKKAQPPQPSTKKLVIKLVKAKPTLPTNFEEETWAKLKSAICAIFLKKPDSCDLEKLYQAVTDLCLHKMGGSLYQRIEKECERHIAAALQSLVGQSPDLVVFLSLVERCWQDLCDQMLMIRGIALYLDRTYVKQTPNVRSLWDMGLQLFRKHLSLSPEVEHKTVTGLLRMIEKERLGEAVARTLLNHLLKMFTALGIYSESFEKPFLECTSEFYAAEGMKYMQQADVPDYLKHVETRLHEEHERCLIYLDASTRKPLVATAEKQLLERHIPAILDKGFTLLMDGNRIEDLQRMHTLFSRVNALESLRQALSSYIRRTGQGIIMDEEKDKEMVASLLEFKASLDTIWEESFFKNEVFCNTIKDAFEHLINLRQNRPAELIAKFLDEKLRAGNKGTSEEELEGMLDKVLVLFRFIQGKDVFEAFYKKDLAKRLLLGKSASIDAEKSMISKLKTECGSQFTNKLEGMFKDIELSKEINESFKQSSQARTKLPSGIEMSVHVLTTGYWPTYPPMDVRLPHELNVYQDIFKEFYLSKYSGRRLMWQNSLGHCVLKAEFPKGKKELAVSLFQTVVLMLFNDAEKLSLEDIKDSTGIEDKELRRTLQSLACGKVRVLQKFPKGRDVDDGDTFTFNDSFTAPLYRIKVNAIQMKETVEENTSTTERVFQDRQYQVDAAIVRIMKTRKVLSHTLLITELFQQLKFPIKPADLKKRIESLIDREYLERDKNNPQIYNYLA

SEQ ID NO: 2665 - protein, 703 aa, Trifolium pratense
NFEEQTWATLKSAICAIFFKQPNSCDLEKLYQAVEDLCIHKMGGNLYQRIEKECEVHISAALQSLVGQSQDLVVFLSLVERCWQDHCDQMLMIRDIALFLDRTYVKQNSSIRSLWDMGLQLFRKHLSLSPEVQHKTVTGLLRMIDSERLGEAVDRTLLNHLLKMFTALGLYPESFEKPSLDCTSEFYAAEGVKYMQQSDVPDYLKHVETRLQEEHERCLIYLDANTKKTLIERTETQLLERHIPAILDKGFSVLMDGNRIEDLQRMHSLFSRVNALESLKQALSSYIRRTGQGIVMDEEKDKDMVQSLLEFKAALDTTWEESFAKNEAFGNTIKDAFEHLINLRQNRPAELIAKFLDDKLRAGNKGTSEEELEGTLDKVLVLFRFIQGKDVFEAFYKKDLAKRLLLGKSASIDAEKSMISKLKTECGSQFTNKLEGMFKDIELSKEINESFRQSSQARTKLPSGIEMSVHVLTTGYWPTYPPMDVRLPHELNVYQDIFKEFYLSKYSGRRLMWQNSLGHCVLKADFPKGKKELAVSLFQTVVLMQFNDAEKLSFQDIKDSTAIEDKELRRTLQSLACGKVRVLQKMPKGRDVDDDDSFVFNDTFTAPLYRIKVNAIQLKETVEENTNTTERVFQDRQYQVDAAIVRIMKTRKVLSHTLLITELFQQLKFPIKPADLKKRIESLIDREYLERDKSNPQVYNYLA

SEQ ID NO: 2666 - protein, 811 aa, Populus trichocarpa
MSLPTKRSATATTSTAGTSTSNTYPPMKKAKCQAASACSPLDYNKNGLHHSDDVVFDPSSMSLDDDPKLVDYRPPPAAANLSRKKATLPQPAKKLVIKLVKAKPTLPTNFEEDTWAKLQSAIKAIFLKQPALCDLEKLYQAVNDLCLHKMGGNLYLRIEKECEAHISAALQSLVGQSPDLEVFLKLVATCWKDLCDQMLMIRGIALYLDRTYVKQTPNVRSLWDMGLQLFRKHLSLSPEVEHKTVTGILRMIERERLGESADRSLLDHLLKMFTSLGIYAESFERPFLECTSEFYAAEGMKYMQQSDVPDYLKHVESRLNEEQDRCNIYIDASTKKPLIATAETQLLERHISAILDKGFMMLMDGHRIKDLQTMYSLFLRVNALESLRQALSMYIRRTGQGIVMDEEKDKDMVSSLLEFKASLDSIWEESFSKNEGFCITIKDAFEHLINLRQNRPAELIAKFLDEKLRAGNKGTSEEELEGTLDKVLVLFRFIQGKDVFEAFYKKDLAKRLLLGKSASIDAEKSMISKLKTECGSQFTNKLEGMFKDIELSKEINESFRQSSQARTKLPSGIEMSVHVLTTGYWPTYPPMDVRLPHELNVYQDIFKEFYLSKYSGRRLMWQNSLGHCVLKAEFPKGKKELAVSLFQTVVLMLFNDAQKLSFQDIKDSTGIEDKELRRTLQSLACGKVRVLQKLPKGRDVEEDDSFVFNEGFTAPLYRIKVNAIQMKETVEENTSTTERVFQDRQYQVDAAIVRIMKTRKVLSHTLLITELFQQLKFPIKPADLKKRIESLIDREYLERDKNNPQIYNYLA

SEQ ID NO: 2667 - protein, 786 aa, Gossypium hirsutum
MTKAKSHSVAGSIDPNKNGLHHHHQDGNDVVFDPSSMSLGDDSKSGVSRSPATANLSRKKATPPQPAKKLVIKFVKAKPTMPTNFEEETWAKLKSAINAIFLKQPDSCDLEKLYQDVNNLCLHKLGGSLYQRIEKECEEHISAALRSLVGQSPDLVVFLSLVEKCWQDLCDQMLMIRSIALYLDRTYVKQTPNVRSLWDMGLQLFRKHLSLAPEVDHKTVTGLLRMIESERLGEAVDRTLINHLLQMFTALGIYSGSFEKPFLECTSEFYAAEGTKYMQQYDVPDYLKHVETRLHEEHERCLLYLGDLTRKPLIATVERQLLERHIHAILDKGFMMLMDGHRIEDLQRMYSLFSRVNSLEPLRQAVSSYIRRTGQGIVMDEEKDKDMVPSLLEFKASLDLIWEESFSKNEGFCNHIRDAFEHLINIRQNRPAELIAKFLDEKLRAGNKGTSEEELEGTLDKVLVLFRFIQGKDVFEAFYKKDLAKRLLLGKSASIDAEKSMISKLKTECGSQFTNKLEGMFKDIELSKEINESFKQSSQARTKLPSGIEMSVHVLTTGYWPTYPPMVVRLPHELNVYQDIFKEFYLSKYSGRRLMWQNSLGHCVLKADFTKGKKELAVSLFQTVVLMLFNDAEKLSFQDIKDSTAIEDKELRRTLQSLACGKVRVLQKLPKGREVEDDDSFVFNEGFSAPLYRIKVNAIQMKETVEENTSTTERVFQDRQYQVDAAIVRIMKTRKVLSHTLLITELFQQLKFPIKPADLKKRIESLIDREYLERDKNNPQIYNYLA

SEQ ID NO: 2668 - protein, 786 aa, Gossypium raimondii
MTKAKSHSVAGSIDPNKNGLHHHHQDGNDVVFDPSSMSLGDDSKSGVPRSPATANLSRKKATPPQPAKKLVIKFVKAKPTMPTNFEEETWAKLKSAINAIFLKQPDSCDLEKLYQDVNNLCLHKLGGSLYQRIEKECEEHISAALRSLVGQSPDLVVFLSLVEKCWQDLCDQMLMIRSIALYLDRTYVKQTPNVRSLWDMGLQLFRKHLSLAPEVDHKTVTGLLRMIESERLGEAVDRTLINHLLQMFTALGIYSGSFEKPFLECTSEFYAAEGTKYMQQYDVPDYLKHVETRLHEEHERCLLYLGDLTRKPLIATVERQLLERHIHAILDKGFMMLMDGHRIEDLQRMYSLFSRVNSLEPLRQAVSSYIRRTGQGIVMDEEKDKDMVPSLLEFKASLDSIWEESFSKNEGFCNHIRDAFEHLINIRQNQPAELIAKFLDEKLRAGNKGTSEEELEGTLDKVLVLFRFIQGKDVFEAFYKKDLAKRLLLGKSASIDAEKSMISKLKTECGSQFTNKLEGMFKDIELSKEINESFKQSSQARTKLPSGIEMSVHVLTTGYWPTYPPMVVRLPHELNVYQDIFKEFYLSKYSGRRLMWQNSLGHCVLKADFTKGKKELAVSLFQTVVLMLFNDAEKLSFQDIKDSTAIEDKELRRTLQSLACGKVRVLQKLPKGREVEDDDSFVFNEGFSAPLYRIKVNAIQMKETVEENTSTTERVFQDRQYQVDAAIVRIMKTRKVLSHTLLITELFQQLKFPIKPADLKKRIESLIDREYLERDKNNPQIYNYLA

SEQ ID NO: 2669 - protein, 821 aa, Gossypium raimondii
MSLPPTKRSLSSNAAVASSSSSSSSSSHFQPSMKKAKSQAVACSLDPNKNGLHNHHNNQGDNDVVFDPSSPMSLDDDSKSDDARAPAAANLSRKKATPPQPAKKLVIKFVKAKPTVPTNFEEETWAKLKSAINAIFLKQPDSCDLEKLYQAVNDLCLHRMGGSLYQRIEKECEARISAALRSLVGQSPDLVVFLSLVEKCWQDLCDQMLMIRGIALYLDRTYVKQTPNVRSLWDMGLQLFCKHLSLAPEVEHKTVTGLLRMIESERLGEAVDRTLLNHLLKMFTALGIYSESFEKPFLERTSEFYAAEGMKYMQQSDVPDYLKHVEMRLNEENERCLLYLDALTRKPLIATAERQLLERHIPAILDKGFMMLMDGHRIEDLQRMYSLFSRVSALESLRQALSSYIRRTGQSIVMDEEKDKDMVSSLLEFKASLDSILEESFSKNEAFCNTIKDSFEHLINLRQNRPAELIAKFLDEKLRAGNKGTSEEELEGTLDKVLVLFRFIQGKDVFEAFYKKDLAKRLLLGKSASIDAEKSMISKLKTECGSQFTNKLEGMFKDIELSKEINESFKQSSQARTKLRSGIEMSVHVLTTGYWPTYPPMDVRLPHELNVYQDIFKEFYLSKYSGRRLMWQNSLGHCVLKADFSKGKKELAVSLFQTVVLMLFNDAQKLSFQDIKDSTGIEDKELRRTLQSLACGKVRVLQKLPKGRDVEDDDSFIFNEGFTAPLYRIKVNAIQMKETVEENTSTTERVFQDRQYQVDAAIVRIMKTRKVLSHTLLITELFEQLKFPIKPADLKKRIESLIDREYLERDKNNPQIYNYLA

SEQ ID NO: 2670 - protein, 795 aa, Panax ginseng
MKKAKSQAVASSLDSSPTNKNGLQHVRFNTEMDDSMIEDPNPNDVVDPSSPAGSRASAGGVTANLARKKATPPQPAKKLVIKLLKAKPTLPTNFEENTWATLKSAISAIFLKQPDPCDLEKLYQAVNDLCLHKMGGNLYQRIEKECETHISAALQSLVGQSEDLVVFLSLVEKCWQDFCDQMLMIRGIALYLDRTYVKQTPNVRSLWDMGLQLFRKHLSLASEVEYKTVFGLLKMIESERLGEAVDRTLLNHLLKMFTALGIYSESFEKPFLERTSEFYASEGVKYMQQSDVPDYLKHVEIRLHEENDRCLLYLDVSTRKPLVATAERQLLERHISAILDKGFMMLMDGNRIEDLQRMYLLFCRVNALESLRQGLNSYIRRTGQGIVVDEEKDKDMVSCLLEFKASLDTIWEESFSKNEAFSNTVKDAFEFLINLRQNRPAELIAKFLDEKLRAGNKGTSEEELEGMLDKVLVLFRFIQGKDVFEAFYKKDLAKRLLLGKSASIDAEKSMISKLKTECGSQFTNKLEGMFKDIELSKEINESFKQSSQARTKLPSGIEMSVHVLTTGYWPTYPPMDVRLPHELNVYQDIFKEFYLSKYSGRRLMWQNSLGHCVLKAEFPKGRKELAVSLFQTVVLMLFNDAQKLSFQDIKDATSIEDKELRRTLQSLACGKVRVLQKFPKGREVDDDDSFSFNDGFTAPLYRIKVNAIQMKETVEENTSTTERVFQDRQYQVDAAIVRIMKTRKVLSHTLLITELFQQLKFPIKPADLKKRIESLIDREYLERDKSNPQIYNYLA

SEQ ID NO: 2671 - protein, 827 aa, Prunus persica
MSHPTKRSSAINNNTSSSTSSSLNPSSGPPMKKAKSQAVACSLDPSKNGLHHHHHHHPHTHPSQDPDNDVVFDPSTMALDEDLKSDDPSSRAVAANLSRKKAQPPQPTKKLVIKLLKAKPTLPTNFEEETWAKLKSAICAIFLKKPDSCDSEKLYQAVNDLCLHKMGGSLYQRIEKECERHIAAALQSLVGQSPDLVVFLSLVERCWQDLCDQMLMIRGIALYLDRTYVKQTPNVRSLWDMGLQLFRKHLSLSPEVEHKTVTGLLRLIEKERLGEAVARTLLNHLLKMFTALGIYSESFEKPFLECTSEFYAAEGMKYMQQADVPDYLKHVETRLHEEHERCLIYLDASTRKPLVATAEKQLLERHIPAILDKGFTLLMDGNRIEDLQRMYTLFSRVNALESLRQALSTYIRRTGQGMIMDEEKDREMVSSLLEFKASLDTIWEESFFKNEAFCNTIKDAFEHLINLRQNRPAELIAKFLDEKLRAGNKGTSEEELEGMLDKVLVLFRFIQGKDVFEAFYKKDLAKRLLLGKSASIDAEKSMISKLKTECGSQFTNKLEGMFKDIELSKEINESFKQSSQARTKLPSGIEMSVHVLTTGYWPTYPPMDVRLPHELNVYQDIFKEFYLSKYSGRRLMWQNSLGHCVLKAEFPKGKKELAVSLFQTVVLMLFNDAEKLSLQDIKDSTGIEDKELRRTLQSLACGKVRVLQKFPKGRDVEDDDTFTFNDGFTAPLYRIKVNAIQMKETVEENTSTTERVFQDRQYQVDAAIVRIMKTRKVLSHTLLITELFQQLKFPIKPADLKKRIESLIDREYLERDKNNPQIYNYLA

SEQ ID NO: 2672 - protein, 763 aa, Tabernaemontana elegans
DPTNLSSDVVMDPGSISNFNGGPVTRSSGTANLSRKKATPPQPQKKLVIKLLKGKPTLPSNFEETTWATLKSAINAIFLKQPDPCDLEKLYQAVNDLCLHKMGGSLYQRIEKECEAHISAALQSLVGQSEDLVVFLSLVEKCWQDFCDQMLMIRGIALYLDRTFVKQTPNVRSLWDMGLQLFRKHLSLASEVEHKTVFGLLKMIDSERLGEAVDRTLLNHLLKMFTALGIYAESFEKPFLERTSEFYAAEGVKYMQQSDVPDYLRHVEIRLHEEHERCLLYLDAGTRKPLVATAERQLLERHIAAILDKGFMMLMDGHRIEDLQRMYTLFSRVNALESLRQALNSYIRRTGHGIVMDDEKDKDMVSSLLEFKASLDTIWEESFSKNEAFSNTIKDAFEYLINLRQNRPAELIAKFLDEKLRAGNKGTSEEELEGTLDKVLVLFRFIQGKDVFEAFYKKDLAKRLLLGKSASIDAEKSMISKLKTECGSQFTNKLEGMFKDIELSKEINESFKQSSQARTKLPSGIEMSVHVLTTGYWPTYPPMDVRLPHELNVYQDIFKEFYLSKYNGRRLMWQNSLGHCVLKAEFPKGKKELAVSLFQTVVLMLFNDAQKLSFQDIRESTGIEDKELRRTLQSLACGKVRVLLKIPKGRDVEDEDSFVFNDQFSAPLYRIKVNAIQMKETVEENTSTTERVFQDRQYQVDAAIVRIMKTRKVLSHTLLITELFQQLKFPIKPADLKKRIESLIDREYLERDKNNPQIYNYLA

SEQ ID NO: 2673 - protein, 814 aa, Manihot esculenta
MSPPTKRSATSTATTSSTSTSATANFPPMKKAKSQAVSACSPIDPSSNKNGLHHVLSGTTADNDVVFDPSSMTLDDDPKLDDRSPPPAANLSRKKATPPQPAKKLVIKLLKAKPTLPANFEEDTWATLQSAIKAIFLKQPDSCDLEKLYQAVNDLCLHKMGGNLYQRIEKECEAHIHAALQSLVGQSPDLVVFLSLVERCWQDLCDQMLMIRGIALYLDRTYVKQTPNVRSLWDMGLQLFRKHLALSPEVEHKIVTGLLRMIERERTLLNHLLKMFTALGIYAESFERPFLDCTSEFYAAEGMKYMQQSDIPDYLKHVEMRLHEEHERCLLYLDASTRKPLIATAERQLLERHISAILDKGFMMLMDGHRIEDLKRMYSLFLRVNALESLRQALSSYIRRTGQGIVMDEEKDKDMVSSLLEFKASLDTIWEESFSKNEVFCNTIKDAFEHLINLRQNRPAELIAKFLDEKLRAGNKGTSEEELEGTLDRVLVLFRFIQGKDVFEAFYKKDLAKRLLLGKSASIDAEKSMISKLKTECGSQFTNKLEGMFKDIELSKEINESFKQSSQARTKLPSGIEMSVHVLTTGYWPTYPPMDVRLPHELNVYQDIFKEFYLSKYSGRRLMWQNSLGHCVLKAEFPKGKKELAVSLFQSVVLMLFNDAQKLSFQDIKDATAIEDKELRRTLQSLACGKVRVLQKLPKGRDVEDDDSFVFNEGFTAPLYRIKVNAIQMKETVEENTSTTERVFQDRQYQVDAAIVRIMKTRKVLSHTLLITELFQQASFPIKPADLKKRIESLIDREYLERDKNNPQIYNYLA

SEQ ID NO: 2674 - protein, 801 aa, Eucalyptus grandis
MKKAKSQAVAGSLDSTTAHKNGLHPHPAKQQSQQPGFDPESDVVFDPATMSLEDGMKSDDMVAGHSVAANLSRKKATPPQPAKKLVIKLLKAKPTLPTNFEEDTWAKLKAAINAIFLKQPVSCSLEDYYQAVNDLCLHKLGGNLYQRIEKECETHISAVLQTLVGQSPDLAVFLSLVERCWQDFCDQMLMIRGIALYLDRTYVKQNPNVRSLWDMGLQLFRKHLHLSVEVEHKTVTGLLRMIERERLGEAVDRTLLNHLLKMFTALGIYAESFEKPFLECTSEFYAAEGMKYMQQSDVPDYMKHVEVRLHEEHERCLLYLDASTRKPLIATAERQLLERHIPAILDKGFMMLMDGNRIEDLQRMYQLFARVNALESLRQALSLYIRQTGQGIVMDEEKDKDMVPSLLEFKASLDAIWEDSFSKNEMFCNTVKDSFEHLINLRQNRPAELIAKFLDEKLRAGNKGTSEEELESILDKVLVLFRFIQGKDVFEAFYKKDLAKRLLLGKSASIDAEKSMITKLKTECGSQFTNKLEGMFKDIELSKEINESFKQSSQARTKLPSGIEMSVHVLTTGYWPTYPPMDVRLPHELNVYQDIFKEFYLSKYSGRRLMWQSSLGHCVLKADFPKGRKELAVSLFQTVVLMLFNDAQKLSFQDIRDSTGIEDKELRRTLQSLACGKVRVLQKVPKGRDVEDDDSFEFNEAFSAPLYRIKVNAIQMKETVEENTSTTERVFQDRQYQVDAAIVRIMKTRKVLSHTLLITELFQQLKFPIKPADLKKRIESLIDREYLERDKNNPQIYNYLA

SEQ ID NO: 2675 - protein, 813 aa, Populus trichocarpa
MSLPTKRSATTSASTSTASTSASNNFLPMKKAKSQAASACSPLDHNKNGLYHSDDVVFDPSSMSLDDDLKLVDYRTPPAAANLSRKKATPPQPAKKLVIKLVKAKPTLPTNFEEDTWAKLQSAIKAIFLKQPALCDLEKLYQAVNDLCLHKMGGNLYLRIEKECETHISAALQSLVGQSPDLVVFLKLVEECWHDLCDQMLMIRSIALYLDRTYVKQTPNARSLWDMGLQLFRKHLSLSPEVEHKTVTGLLQMIERERLGETVNRKPLGHLLKMFTSLGIYAESFERPFLECTSEFYAAEGMTYMQQSDVPDYLKHVESRLNEEQDRCKIYLDSSTKKPLIATAERQLLERHISAILDKGFMMLMNGHRIEDLKRIYSLFLRVNALESLRQALSMYIRRTGQGIVMDEEKDKDMVSSLLEFKACLDSIWEESFSKNEGFCITVKDAYEHLINLRQNHPAELIAKFLDEKLRAGNKGTSEEELEGTLEKVLVLFRFIQGKDVFEAFYKKDLAKRLLLGKSASIDAEKSMISKLKTECGSQFTNKLEGMFKDIELSKEINESFKQSSQARTKLPSGIEMSVHVLTTGYWPTYPPMDVRLPHELNVYQDIFKEFYLSKYSGRRLMWQNSLGHCVLKAEFPKGKKELAVSLFQTVVLMLFNDAQKLSFQDIKDSTGIEDKELRRTLQSLACGKVRVLQKLPKGRDVEDDDSFVFNEGFAAPLYRIKVNAIQMKETVEENTSTTERVFQDRQYQVDAAIVRIMKTRKVLSHTLLITELFQQLKFPIKPADLKKRIESLIDRDYLERDKSNPQIYNYLA

SEQ ID NO: 2676 - protein, 820 aa, Citrullus lanatus
MSLPTKRSATATANANTAAATSVLSSSPTSTASSISSPPMKKTKSQPLDPNKNGLHLHDDADFDPSSMALDEDLKPDDSPLIGASRAVATNLSRKKATPPQPAKKLVIKLLKAKPTLPANFEEDTWAKLKSAICAIFLKQPNSCDLEKLYQAVNDLCLHKMGGNLYRRIEKECEVHISAALQSLVGQSPDLVVFLGYVEKCWQDFCDQMLMIRGIALYLDRTYVKQTPSVCSLWDMGLQLFRKHLSLSSEVEHKTVTGLLRMIEKERLGEAINRTLLNHLLKMFTALGIYSESFEKPFLEYTSEFYAAEGMKHMQQSDVSEYLKHAEGRLQAEQDRCLHYLDSSTRKPLIATTERQLLERHISAILDKGFTLLMDGNRMGDLLRMYTLISRVNALESLRQALSSYIRRTGQNIVMDDEKDKDMVSSLLEFKASLDTIWEESFSKNEAFCNTIKDAFEHLINLRQNRPAELIAKFLDEKLRAGNKGTSEEELEGTLDKVLVLFRFIQGKDVFEAFYKKDLAKRLLQSASIDAEKSMISKLKTECGSQFTNKLEGMFKDIELSKEINESFKQSSQARTKLPMGIEMSVHVLTTGYWPTYPPMDVRLPHELNVYQDIFKEFYLSKYSGRRLMWHNSLGHCVLKAEFPKGKKELAVSLFQTVVLMLFNDAEKLSFQDIRESTGIEDKELRRTLQSLACGKVRVLQKIPKGRDVEDNDSFVFNDGFTAPLYRLKVNAIQMKETVEENTSTTERVFQDRQYQVDAAIVRIMKTRKVLSHTLLITELFQQLKFPIKPADLKKRIESLIDREYLERDKNNPQIYNYLA

SEQ ID NO: 2677 - protein, 787 aa, Lactuca sativa
MKKAKSQAVSCSLDNKNGFQQHQFDNNPSAEPSSMIEDPTENDAGRASSAGGFTANLARKKATPPQPAKKLVIKLLKAKPTLPTNFEENTWAVLKSAISAIFLKQPDPCDLEKLYQAVNDLCLYKMGGSLYQRIERECEAHISAALNSLVGQSEDLVVFLSLVQKTWQDFCDQMLMIRGIALYLDRTYVKQTPTVRSLWDMGLQLFRKHLSLASEVEHKTVFGLLKMIESERLGEAVDRTLLNHLLKMFIALGIYSESFEKPFLECTSEFYAAEGVKYMQYSDVPDYLKHVEIRLHEEHDRCLLYLDATTRKPLVATAERQLLELHISAILDKGFTMLMDGNRTQDLRRMYTLFHRVNALESLRQALSSYIRKTGQGIVTDEEKDKDMVFSLLEFKLSLDKIWEDSFSKNDVFCNTIKEAFEHLINLRQNRPAELIAKFLDEKLRAGNKGTSEEELEGTLDKVLVLFRFIQGKDVFEAFYKKDLAKRLLLGKSASIDAEKSMISKLKTECGSQFTNKLEGMFKDIELSKEINESFKQSSQARTKLPSGIEMSVHVLTTGYWPTYPPMDVRLPHELNVYQDIFKEFYLSKYSGRRLMWQNSLGHCVLKAEFPKGKKELAVSLFQTVVLMLFNDAQKLSFQDIKDATSIEDKELRRTLQSLACGKVRVLQKIPKGREVDDNDSFMFNDVFTAPLYRIKVNAIQLKETVEENASTTERVFQDRQYQVDAAIVRIMKTRKVLSHTLLITELFQQLKFPIKPVDLKKRIESLIDREYLERDKSNPQIYNYLA

SEQ ID NO: 2678 - protein, 812 aa, Amsonia hubrichtii
MKKAKSQAVAYSLDNKNGQPPHVHFSPDIEAIDGSNSGNPVSMIDMEEEDPSNLSNDAVMDPGNVNNFNGGPVTRSSGTANLSRKKATPPQPQKKLVIKLLKGKPTLPSNFEETTWATLKSAINAIFLKQPDPCDLEKLYQAVNDLCLHKMGGSLYQRIEKECEAHISAALQSLVGQSEDLVVFLSLVEKCWQDFCDQMLMIRGIALYLDRTYVKQTPNVRSLWDMGLQLFRKHLSLASEVEHKTVFGLLKMIDSERLGEAVDRTLLNHLLKMFTALGIYAESFEKPFLERTSEFYAAEGVKYMQQSDVPDYLRHVEMRLHEEHERCLLYLDASTRKPLVATAERQLLEWHIAAILDKGFMMLMDGHRIEDLQRMYTLFSRVNALESLRQALSSYIRRTGQGIVMDDEKDKDMVSSLLEFKASLDTIWEESFSKNDAFSNTIKDAFEHLINLRQNRPAELIAKFLDEKLRAGNKGTSEEELEGTLDKVLVLFRFIQGKDVFEAFYKKDLAKRLLLGKSASIDAEKSMISKLKTECGSQFTNKLEGMFKDIELSKEINESFKQSSQARTKLPSGIEMSVHVLTTGYWPTYPPMDVRLPHELNVYQDIFKEFYLSKYHGRRLMWQNSLGHCVLKAEFPKGKKELAVSLFQTVVLMLFNDAQNLSFQDIRESTGIEDKELRRTLQSLACGKVRVLQKIPKGRDVEDEDSFVFNDQFSAPLYRIKVNAIQMKETVEENTSTTERVFQDRQYQVDAAIVRIMKTRKVLSHTLLITELFQQLKFPIKPADLKKRIESLIDREYLERDKNNPQIYNYLA

SEQ ID NO: 2679 - protein, 788 aa, Helianthus annuus
MKKAKSQAVSCSLDNKNGFQSHQFDSNSGVQDPSSMIVDPTENDAVRASSAGGFTANLARKKATPPQPAKKLVIKLVKAKPTLPTNFEENTWSVLKSAISAIFLKQPDPCDLEKLYQAVNDLCLHKMGGSLYQRIERECESHISSALQSLVGQSEDLVVFLSLVHKTWQDFCDQMLMIRGIALYLDRTYVKQTPSVRSLWDMGLQLFRKHLSLASEVEHKTVFGLLKMIESERLGEAVDRTLLNHLLKMFTALGIYSESFEKPFLECTSEFYAAEGVKYMQQSDVPDYLKHVEVRLHEEHDRCLLYLDASTRKPLVATAERQLLELHISAILDKGFTMLMDGNRTQDLRRMYTLFFRVNALESLRHALSAYIRKTGQGIVTDEEKDKDMVSSLLEFKVSLDKIWEESFSKNDVFCNTIKEAFEYLINLRQNRPAELIAKFLDEKLRAGNKGTSEEELEGTLDKVLVLFRFIQGKDVFEAFYKKDLAKRLLLGKSASIDAEKSMISKLKTECGSQFTNKLEGMFKDIELSKEINESFKQSSQARTKLPSGIEMSVHVLTTGYWPTYPPMDVRLPHELNVYQDIFKEFYLSKYSGRRLMWQNSLGHCVLKAEFAKGKKELAVSLFQTVVLMLFNDAQKLSFEDIKDATSIEDKELRRTLQSLACGKVRVLQKIPKGREVDDNDLFMFNDGFTAPLYRIKVNAIQLKETVEENASTTERVFQDRQYQVDAAIVRIMKTRKMLSHTLLITELFQQLKFPIKPVDLKKRIESLIDREYLERDKSNPQIYNYLA

SEQ ID NO: 2680 - protein, 826 aa, Chenopodium quinoa
MSPPNTKRPSSAASNTNSNNLSSSAFSSPMKKPKSHSQPLDSKNGLHHSFNSAADDDTDTPASMIVDDDLKSDAAAVSPSSNSRAPITAGVTANLSRKKATPPNPSTKKLVIKLVKAKPTLPPNFEEDTWATLKSAINAIFLKQPDSCDLEKLYQAVNDLCLHKMGGSLYQRIEKECEAHVSAVLHSLVGQSPDLVVFLSLVEKCWQDLCDQMLMIRGIALYLDRTYVKQTPNVKSLWDMGLQLFRKHLSSCPEVEHKTVTGLLRMIERERLGEAVDRTLLNHLLKMFTALGIYQESFEKPFLACTEEFYAAEGSKYMQQSDVPDYLKHVEIRLHEEQERCLLYLDASTRKPLISTAEKQLLERHISAILDKGFMMLMDGSRVDDLHRMYSLFSRVDALESLRQALSSYIRKAGQATVMDEEKDKDMVSCLLEFKAALDKIWEESFSKNESFGNTIKDSFEFLINLRQNRPAELIAKFLDEKLRAGNKGTSEEELEGTLDKVLVLFRFIQGKDVFEAFYKKDLAKRLLLGKSASIDAEKSMISKLKTECGSQFTNKLEGMFKDIELSKEINESFKQSSQARTKLPSGIEMSVHVLTTGYWPTYPPMDVRLPHELNVYQDIFKEFYLSKHSGRRLMWQNSLGHCVLKADFPKGKKELAVSLFQAVVLMLFNDAESLSFQDMKDATGIEDKELRRTLQSLACGKVRVLQKVPKGREVEDDDSFVFNDTFAAPLYRIKVNAIQMKETVEENTSTTERVFQDRQYQVDAAIVRIMKTRKVLSHTLLITELFQQLKFPIKPADLKKRIESLIDREYLERDKNNPQIYNYLA

SEQ ID NO: 2681 - protein, 769 aa, Ambrosia trifida
NNNNNNNNSASQDPSSMIVDPTENDAVRASSPGGFTANLGRKKATPPQPAKKLVIKLLKAKPTLPTNFEENTWAVLKSAISSIFLKQPDPCDLEKLYQAVNDLCLHKMGGSLYQRIEKECESHISSALQSLVGQSEDLVVFLSLVHKTWQDFCDQMLMIRGIALYLDRTYVKQTPSVRSLWDMGLQLFRKHLSLASEVEHKTVFGLLKMIESERLGEAVDRTLLSHLLKMFTALGIYPESFEKPFLECTSEFYAAEGVKYMQHSDVPDYLKHVEVRLHEEHDRCLLYLDASTRKPLVATAERQLLELHITAILDKGFTMLMDGNRTQDLRRMYTLFSRVNALESLRHALSSYIRKTGQGIVTDEEKDKDMVYSLLEFKASLDKIWEESFSKNDVFCNTIKEAFEHLINLRQNRPAELIAKFLDEKLRAGNKGTSEEELEGTLDKVLVLFRFIQGKDVFEAFYKKDLAKRLLLGKSASIDAEKSMISKLKTECGSQFTNKLEGMFKDIELSKEINESFKQSSQARTKLPSGIEMSVHVLTTGYWPTYPPMDVRLPHELNVYQDIFKEFYLSKYSGRRLMWQNSLGHCVLKAEFAKGKKELAVSLFQTVVLMLFNDAQKLSFEDIKDATSIEDKELRRTLQSLACGKVRVLQKIPKGREVDDNDSFMFNDGFTAPLYRIKVNAIQLKETVEENASTTERVFQDRQYQVDAAIVRIMKTRKMLSHTLLITELFQQLKFPIKPVDLKKRIESLIDREYLERDKSNPQIYNYLA

SEQ ID NO: 2682 - protein, 785 aa, Brassica rapa
MSLPTKRSTCPSSSSSSSSPPMKKAKNGLHPPSADKVGFPMEEEDEDPTPSAANLSRKKATLPQPSKKLVIKLNKAKPSLPTNFEDTTWDNLQSAIRAIFLKQPFSFDLERLYQAVDNLCLHKLEGKLYQRIQKECEEHISAALQSLVGQDTDLSVFLSLVENCWQDFCDQMLMIRSIALSLDRKYVIQNPNIRSLWEMGLQLFRKHLSLSPDVEQRTVTALLRMIEKERLAEAVNRTLLSHLLKMFTALGIYTESFEKHFLECTSEFYAAEGMKYMQQYDVPEYLKHVEGRLHEENERCILYIDPSTRKPLISTIEKQLLERHTVAILDKGFTPLMDGRRTEDLQRMYTLFSRVNALESLRQALSSYIRKTGQKIVMDEEKDKDMVQSLLDFKASLDIVWEESFCKNESFGNTIKDSFEHLINLRQNRPAELIAKFLDEKLRAGNKGTSEEELESTLEKVLVLFRFIQGKDVFEAFYKKDLAKRLLLGKSASIDAEKSMISKLKTECGSQFTNKLEGMFKDIELSKEINESFKQSSQARTKLPSGIEMSVHVLTTGYWPTYPPMDVKLPHELNVYQDIFKEFYLSKYSGRRLMWQNSLGHCVLKADFTKAKKELAVSLFQAVVLMLFNDAMKLSFEDIKDSTGIEDKELRRTLQSLACGKVRILHKYPKGRDVQDGDEFDFNDTFTAPLYRIKVNAIQMKETVEENTSTTERVFQDRQYQIDAAIVRIMKTRKVLSHTLLITELFQQLKFPIKPADLKKRIESLIDREYLERDKSNPQIYNYLA

SEQ ID NO: 2683 - protein, 797 aa, Solanum phureja
MSQPNKRSSSLSTPPPSPLSRSMKKAKSQAAATDDNKNGQQQHHKVESTDEPCVSMIQYSGGGVTSNLSRKKATPPPKKQLVIKLNKAKPTLPTNFEENTWATLKSAISAIFLKQPDPCDLEKLYQAVNDLCLHKMGGSLYQRIEKECEAHIVAVLQSLVGQSEDLVVFLSLVERCWQDFCDQMLMIRGIALFLDRTYVKQTPNGHSLWDMGLQLFRKHLCLASEVEHKIVFGLLQMIESERLGEAVDRTLLNHLLKMFTALGIYAESFEKPFVERTSEFYAAEGVKYMQQSDVPDYLKHVEVRLHEEHDRCLHYLDASTRKPLIATTERQLLERHISAILDKGFMMLMDGKRIEDLRRMYSLFPRVEALESLKQTLSLYIRKNGKSIVHDDEKDKDMVSSLLEFKASVDTIWEESFSKNEAFGNTIKDAFGHLINVCENRPAELIAKFLDEKLRAGNKGTSEEELEGILDKVLVLFRFIQGKDVFEAFYKKDLAKRLLLGKSASIDAEKSMISKLKTECGSQFTNKLEGMFKDIELSKEINESFKQSSQARKKLPTGIEMSVHVLTTGYWPTYPPMDVRLPHELNIYQDIFKEFYLSKYSGRRLMWQNSLGHCVLKAEFPKGKKELAVSLFQAVVLMLFNDAEKLSFLDMREATRIEDKELRRTLQSLACGKVRVLQKIPKGRDVEDDDTFVFNDQFTTPLYRIKVNAIQMKETVEENTNTTERVFQDRQYQVDAAIVRIMKTRKVLSHTLLITELFQQLKFPVKPADLKKRIESLIEREYLERDKNNPQVYNYLA

SEQ ID NO: 2684 - protein, 825 aa, Beta vulgaris
MSPPNNNKRPASSPTSTHTNLTSSSFSPSMKKPKSQSLDTRNALHSAFNSSSAVDDDPASVIVDNDDDLKSNAVISSSANSRSAPISGGVTANLSRKKATPPNPSTKKLVIKLVKAKPTLPPNFEEVTWATLKSAINAIFLKQPDSCDLEKLYQAVNDLCLHKMGGSLYQRIEKESEAHVSTVLHSLVGQSPDLVVFLSLVEKCWQDLCDQMLMIRGIALYLDRTYVKQTPNVKSLWDMGLQLFRKHLSLCREVEHKTVTGLLRMIERERLGEAVDRTLLNHLLKMFTALGIYQESFEKPFLDCTEEFYAAEGAKYMQQSDVPDYLKHVEIRLHEEQERCLLYLDASTRKPLISTAEKQLLERHISAILDKGFMMLMEGSRVDDLQRMYNLFLRVNALESLRQALSSYIRKAGQATVMDEEKDKDMVSCLLEFKAALDKIWEESFSKNESFGNTIKDSFEYLINLRQNRPAELIAKFLDEKLRAGNKGTSEEELEGTLDKVLVLFRFIQGKDVFEAFYKKDLAKRLLLGKSASIDAEKSMISKLKTECGSQFTNKLEGMFKDIELSKEINESFKQSSQARTKLPSGIEMSVHVLTTGYWPTYPPMDVRLPHELNVYQDIFKEFYLSKYSGRRLMWQNSLGHCVLKADFPKGKKELAVSLFQAVVLMLFNDAEKLSFQDIKDATGIEDKELRRTLQSLACGKVRVLQKVPKGREVEDDDSFVFNDTFSAPLYRIKVNAIQMKETVEENTSTTERVFQDRQYQVDAAIVRIMKTRKVLSHTLLITELFQQLKFPIKPADLKKRIESLIDREYLERDKNNPQIYNYLA

SEQ ID NO: 2685 - protein, 795 aa, Aristolochia fimbriata
MKKAKSQPQSGPFSLEKNGIQPQQSPFNEDDDEDSMLVDEDVKAVAPNVLGIGCSGSTTGVAANLSRKKATPPQPAKKLVIKFTKDKPKLPTNFEEDTWATLKSAIGAIFLKQPDPCDSEKLYQAVSDLCLHKMGGNLYQRIQKECEAHISTTLQSLVGQSPDLVVFLSLVEKCWQDLCDQMLMIRGIALYLDRTYVKQNPNVRSLWDMGLQLFRKHLSLSPEVEHKTVTGLLRLIERERLGETIDRSLLNHLLKMFTALGIYTESFEKPFLECTSEFYAAEGVKRMQQDNVTAYLQHVELRLHEEHERCLLYLDASTKKPLVATAERQLLDRHTSAILDKGFTTLMDTNRIEDLHRMYGLFSRVNALESLRQALSSYIRGTGQGIIMDEEKDKDLVSCLLEFKASLDTIWELSFSKNEAFSNTIKDAFEHLINLRQNRPAELIAKYLDEKLRAGNKGGSEEELESTLDKVLVLFRFIQGKDVFEAFYKKDLAKRLLLGKSASIDAEKSMISKLKTECGSQFTNKLEGMFKDIELSKEINESFKQSSQARTKLPTGIEMSVHVLTTGYWPTYPPMDVRLPHELNVYQDIFKEFYLSKYSGRRLMWQNSLGHCVLKAEFPKGKKELAVSLFQTVVLMLFNDTQRLIFQDIKESTGIEDKELRRTLQSLACGKVRVLQKLPKGREVEDSDLFVFNEEFSAPLYRIKVNAIQMKETVEENTSTTERVFQDRQYQVDAAIVRIMKTRKVLSHTLLITELFQQLKFPIKPADLKKRIESLIDREYLERDKNNPQIYNYLA

SEQ ID NO: 2686 - protein, 784 aa, Chrysanthemum coronarium
MKKAKSQVGSSSSSSSHSFDNKNGFQYQIENNTNSGDAMVEDPVEMTSSGYAANLARKKATVPVPNKKLVIKLKGKPAMPTNLEEDRWTVLKSAISAIFLKQPGSCDLEKLYQAVNDLCLWKMGGSLYQRIERECEAHISAALQSLVGQSEDLVVFLSLVQKTWQDFCDQMLMIRSIALFLDRTYVKQSPNVKSLWDMGLQLFRKHLSLASEVEHKTVFGLLKMIESERLGEAVDRTLLSHLLKMFTALGIYSESFEKPFLECTSEFYAAEGVRYMQNSDVPDYLKHVEVRLHEEHDRCLLYLDDHTRKPLVATAERQLLELHISAILDKGFTMLMDGNRTQDLKRMYTLFSRVGALESLRQALSSYIRKTGQSIVTDEEKEKDMVSSLLEFKVSLDKIWEDSFSKNDVFSNTIKEAFEHLINLRQNRPAELIAKFLDEKLRAGNKGTSEEELEGTLDKVLVLFRFIQGKDVFEAFYKKDLAKRLLLGKSASIDAEKSMISKLKTECGSQFTNKLEGMFKDIELSKEINESFRQSSQARTKLPSGIELSVHVLTTGYWPTYPPMDVRLPHELNVYQDIFKEFYLSKYSGRRLMWQNSLGHCVLKAEFPKGKKELAVSLFQTVVLMLFNDAQKLSLQDIRDATSIEDKELRRTLQSLACGKVRVLQKIPKGREVDDNDSFEFNDAFTAPLYRIKVNAIQLKETVEENASTTERVFQDRQYQVDAAIVRIMKTRKTLSHTLLITELFQQLKFPIKPVDLKKRIESLIDREYLERDKSNPQIYNYLA

SEQ ID NO: 2687 - protein, 783 aa, Brassica rapa
MSLPTKRSTCSAASTDSSLSSPPMKKSKNGLHASDKVGFSMDEDPAPSSAANLSRKKATLPHPTKKLVIKLNKAKPSLPTNFEDTTWENLQSAIRAIFLKQPFPFDLERLYQAVDDLCLHKLEGKLYERIEKECEEHISSALQSLVGQDTDLSVFLSLVEKCWQDFCDQMLMIRSIALSLDRKYVIQHTNVRSLWEMGLQLFRKHLSLSPDVEQRTVTALLRMIERERLAEAVNRTLLSHLLKMFTALGIYAESFEKQFLECTSEFYAAEGMKYMQQYDVPEYLKHVEGRLHEENERCILYIDASTRKPLISAVEKQLLERHIHAVLDKGYTPLMDGRRTEDLQRMYTLFSRVSALESLRQALSSYIRKTGQKIVMDEEKDKDMVQSLLDFKASLDIVWEESFCKNESFGNTIKDSFEHLINLRQNRPAELIAKFLDEKLRAGNKGTSEEELESTLEKVLVLFRFIQGKDVFEAFYKKDLAKRLLLGKSASIDAEKSMISKLKTECGSQFTNKLEGMFKDIELSKEINESFKQSSQARTKLPSGIEMSVHVLTTGYWPTYPHMDVKLPHELNVYQDIFKEFYLSKYSGRRLMWQNSLGHCVLKAGFSKGKKELAVSLFQAVVLMLFNDAMKLSFEDIKDSTGIEDKELRRTLQSLACGKVRVLQKYPKGRDVQDRDEFDFNDTFTAPLYRIKVNAIQMKETVEENTSTTERVFQDRQYQIDAAIVRIMKTRKVLSHTLLITELFQQLKFPIKPADLKKRIESLIDREYLERDKSNPQIYNYLA

SEQ ID NO: 2688 - protein, 781 aa, Brassica napus
MSLPTKRSTCPSSSSPPMKKAKNGLHTPSADKVGFPMEEEDEDPTPSAANLSRKKATLPQPSKKLVIKLNKAKPSLPTNFEDTTWDNLQSAIRAIFLKHPFPFDLERLYQAVDNLCLHKLEGKLYKRIEKECEEHISVALQSLVGQDTDLSVFLSLVEKCWQDFCDQMLMIRSIALSLDRKYVIQNPNIRSLWEMGLQLFRKHLSLSPDVEQRTVTALLRMIEKERLAEAVNRTLLSHLLKMFTALGIYTESFEKHFLECTSEFYAAEGMKYMQQYDVPEYLKHVEGRLHEENERCILYIDPSTRKPLISTIENQLLERHTVAILDKGFTPLMDGRRTEDLQRMYTLFSRVNALESLRQALSSYIRKTGQKIVMDEEKDKDMVQSLLDFKASLDIVWEESFCKNESFGNTIKDSFEHLINLRQNRPAELIAKFLDEKLRAGNKGTSEEELESTLEKVLVLFRFIQGKDVFEAFYKKDLAKRLLLGKSASIDAEKSMISKLKTECGSQFTNKLEGMFKDIELSKEINESFKQSSQARTKLPSGIEMSVHVLTTGYWPTYPPMDVKLPHELNVYQDIFKEFYLSKYSGRRLMWQNSLGHCVLKADFTKAKKELAVSLFQAVVLMLFNDAMKLSFEDIKDSTGIEDKELRRTLQSLACGKVRILHKYPKGRDVQDGDEFDFNDTFTAPLYRIKVNAIQMKETVEENTSTTERVFQDRQYQIDAAIVRIMKTRKVLSHTLLITELFQQLKFPIKPADLKKRIESLIDREYLERDKSNPQIYNYLA

SEQ ID NO: 2689 - protein, 786 aa, Chrysanthemum coronarium
MKKAKSQVGSSSSSSSHSFDNKNGFQYQIENTTNTNSGDAMIEDPVEMTSSGYAANLARKKATVPVPNKKLVIKLKGKPAMPTNLEEDRWTVLKSAISAIFLKQPGSCDLEKLYQAVNDLCLWKMGGSLYQRIERECEAHISAALQSLVGQSEDLVVFLSLVQKTWQDFCDQMLMIRSIALFLDRTYVKQSPNVKSLWDMGLQLFRKHLSLASEVEHKTVFGLLKMIESERLGEAVDRTLLSHLLKMFTALGIYSESFEKPFLECTSEFYAAEGVRYMQNSDVPDYLKHVEVRLHEEHDRCLLYLDDHTRKPLVATAERQLLELHISAILDKGFTMLMDGNRTQDLKRMYTLFSRVGALESLRQALSSYIRKTGQSIVTDEEKEKDMVSSLLEFKVSLDKIWEDSFSKNDVFSNTIKEAFEHLINLRQNRPAELIAKFLDEKLRAGNKGTSEEELEGTLDKVLVLFRFIQGKDVFEAFYKKDLAKRLLLGKSASIDAEKSMISKLKTECGSQFTNKLEGMFKDIELSKEINESFRQSSQARTKLPSGIELSVHVLTTGYWPTYPPMDVRLPHELNVYQDIFKEFYLSKYSGRRLMWQNSLGHCVLKAEFPKGKKELAVSLFQTVVLMLFNDAQKLSLQDIRDATSIEDKELRRTLQSLACGKVRVLQKIPKGREVDDNDSFEFNDAFTAPLYRIKVNAIQLKETVEENASTTERVFQDRQYQVDAAIVRIMKTRKTLSHTLLITELFQQLKFPIKPVDLKKRIESLIDREYLERDKSNPQIYNYLA

SEQ ID NO: 2690 - protein, 803 aa, Triphysaria pusilla
MKKAKSQAAACSVDGSKSGQQQQSTPHVHFADPPALSPMIEDHPNDVVMGASSSSNPFGRGVAASGGGVTSNLSRKKATPPQPAKKLVIKLNKAKPTLPTNFEENTWSILKSAIGAIFLKQPNPCDLEKLYQVVNDLCLHKMGGGLYQRIEKECEAYISAALQSLVGQSEDLVVFLSLVQKCWQDFCDQMLMIRGIALYLDRTYVKQTPSVRSLWDMGLQLFHKHLSLASEVEHKTVFGLLKLIEGERLGEAVNRTLLNHLLKMFTALGIYPESFEKPFLEGTSEFYAAEGVKYMQQADVPDYLKHVEIRLQEEHERCLLYLDASTRKPLIATAEKQLLERHVSAILDKGFTMLMDGKRIDDLQRMYMLFSKVNALESLRQALNQYIRRTGHSIVMDEEKDKEMVSSLLDFKANLDRIWEDSFFKNESFSNTIKDAFEHLINIRQNRPAELIAKFVDEKLRAGNKGTSEEELEGTLDKVLVLFRFIQGKDVFEAFYKKDLAKRLLLGKSASIDAEKSMITKLKTECGSQFTNKLEGMFKDIELSKEINESFKQSSQARTKLPSGIEMSVHVLTTGYWPTYPPMDVRLPHELNLYQDIFKEFYLSKYSGRRLMWQNSLGQCVLKAEFPKGKKELAVSLFQTVVLMLFNDAQKLSFQDIKESTGIEDKELRRTLQSLACGKFRILLKNPKGRDVEDDDDFVCNDQFAAPLYRIKVNAIQMKETVEENASTTERVFQDRQYQVDAAIVRIMKTRKVLSHTLLITELFQQLKFPIKPADLKKRIESLIDREYLERDKSNPQVYNYLA

SEQ ID NO: 2691 - protein, 757 aa, Amaranthus tuberculatus
TQPLSDYSHRNVVSSSDSRSTIAANLSRKKATPPNPSTKKLVIKLVKAKPTLPPNFEEDTWATLKSAISAIFLKQPDSCDLEKLYQAVNDLCLHKMGGSLYQRIEKEFEAHISAILHSMVGQSPDLVVFLSLVEKCWQDLCDQMLMIRGIALYLDRTYVKQTPNVKSLWDMGLQIFRKHLSLCAEVEHKTVTGLLRMIEKERLGDAVDRTLLNHLLKMFTALGIYQESFAKPFLACTEEFYAAEGVKYIQQSDVPDYLKHVEMRLHEEHERCLLYLDASTKKPLISTAEKQLLERHISAILDKGFNMLMDGCRIDDLRRMYDLFSRVEALESLRQAISSYIRKAGQATVMDEEKDKDMVTCLLNFKATLDKIWEESFSKNESFGNTIKESFEYLINLRQNRPAELIAKFLDEKLRAGNKGTSEEELEGTLDKVLVLFRFIQGKDVFEAFYKKDLAKRLLLGKSASIDAEKSMITKLKTECGSQFTNKLEGMFKDIELSKEINDSFKQSSQARTKLPSGIEMSVHVLTTGYWPTYPPMNVRLPHELNVYQDIFKEFYLSKYSGRRLMWQNSLGHCVLKADFPKGKKELAVSLFQAVVLMLFNDAEKLSFQDIKDATGIEDKELRRTLQSLACGRVRVLQKVPKGREVDDNDSFVFDELFSAPLYRIKVNAIQMKETVEENTSTTERVFQDRQYQVDAAIVRIMKTRKVLSHTLLITELFQQLKFPIKPVDLKKRIESLIDREYLERDKNNPQIYNYLA

SEQ ID NO: 2692 - protein, 819 aa, Petroselinum crispum
MSNPHSSSSSSTTNNSNKRSSSSSSNTAAPFYSPMKKAKSQAVANGLSQHVRFDENEAMIDDPNPNDVVDPSPSGNRASAGGITANLARKKAEATPPQPAKKLVIKLNKAKPKIPTNFEETTWEKLKSAITAIFLKQPDSCDLEKLYQAVNDLCLYKMGGSVYQRIEKECETHISAALQSLVGQSEDLVVFLSLVEKCWQDFCDQMLMIRGIALYLDRTYVKQTPNVRSLWDMGLQLFRKHLALASEVEHKTVFGLLKMIESERRGEAVGRTLLNHLLKMFTALGIYSESFEKPFLEGTSEFYAAEGVQYMQQADVPDYLKHVEIRLHEEHDRCVLYLDICTRKPLVATAERQLLERHISAILDKGFTMLMDGSRIEDLQRMYMLFSRVDALESLRHALNSYIRKTGQGIVMDEEKDKDMVSCLLEFKASLDRILEDSFSKNEAFCNTVKDAFEHLINLRQNRPAELIAKFLDEKLRAGNKGTSEEELEGMLDKVLVLFRFIQGKDVFEAFYKKDLAKRLLLGKSASIDAEKSMISKLKTECGSQFTNKLEGMFKDIELSKEINESFKQSSQARTKLPSGIEMSVHVLTTGYWPTYPPMDVRLPHELNVYQDIFKEFYLSKYSGRRLMWQNSLGHCVLKAEFPKGRKELAVSLFQTVVLMLFNDAEKLSFQDIKDATSIEDKELRRTLQSLACGKVRVLQKLPKGREVDDNDSFSFNDQFAAPLYRIKVNAIQMKETVEENTSTTERVFQDRQYQVDAAIVRIMKTRKVLSHTLLITELFQQLKFPIKPSDLKKRIESLIDREYLERDKSNPQIYNYLA

SEQ ID NO: 2693 - protein, 793 aa, Brassica oleracea
MSLPTKRSTCSAASSASTDSSFSSPPMKKAKNGLHAPSSQPNASDKAGFSMEEDPAPSAAANLSRKKATLPHPTKKLVIKLNKAKPSLPTNFEDTTWENLQSAIRAIFLKQPFPFDLERLYQAVDDLCLHKLEGKLYERIEKECEEHISSALQSLVGQDTDLSVFLSLVEKCWQDFCDQMLMIRSIALSLDRKYVIQHTNVRSLWEMGLQLFRKHLSLSPDVEQRTVTALLRMIGRERLAEAVNRTLLSHLLKMFTALGIYAESFEKQFLECTSEFYAAEGMKYMQQYDVPEYLKHVEGRLHEENERCILYIDASTRKPLISAVEKQLLERHIHAVLDKGFTPLMDGRRTEDLQRMYTLFSRVSALESLRQALSSYIRKTGQKIVMDEEKDKDMVQSLLDFKASLDIVWEESFCKNESFGNTIKDSFEHLINLRQNRPAELIAKFLDEKLRAGNKGTSEEELESTLEKVLVLFRFIQGKDVFEAFYKKDLAKRLLLGKSASIDAEKSMISKLKTECGSQFTNKLEGMFKDIELSKEINESFKQSSQARTKLPSGIEMSVHVLTTGYWPTYPPMDVKLPHELNVYQDIFKEFYLSKYSGRRLMWQNSLGHCVLKADFSKGKKELAVSLFQAVVLMLFNDAMKLSFEDIKDSTGIEDKELRRTLQSLACGKVRVLQKYPKGRDVQDGDEFDFNDTFTAPLYRIKVNAIQMKETVEENTSTTERVFQDRQYQIDAAIVRIMKTRKVLSHTLLITELFQQLKFPIKPADLKKRIESLIDREYLERDKSNSQIYNYLA

SEQ ID NO: 2694 - protein, 820 aa, Daucus carota
MSNPHSSSSSSTNSNKRSSSSSSSNLAAGEAPYFSPMKKAKSQAVACSLDSNKNGHVRFDDNDAMIDDPNPNDPSPSVIRASAGGITSNLARKKATPPQPAKKFVIKLNKAKPTIPTNFEETTWETLKSAITAIFLKQPDPCDLEKLYQAVNDLCLHKMGGSVYQRIEKECETHISAALQSLVGQSEDLVVFLSLVEKCWQDFCDQMLMIRGIALYLDRTYVKQTPNVRSLWDMGLQLFRKHLALASEVEHKTVFGLLKMIESERRGEAVDRTLLNHLLKMFTALGIYSESFEKPFLEGTSEFYAAEGAKYMQQADVPDYLKHVEIRLHEEHDRCVLYLDIGTRKPLVATAERQLLERHISAILDKGFTMLMDGSRIEDLQRMYVLFCRVDALESLRHALNSYIRKTGQGIVMDEEKDKDMVSCLLEFKASLDTILEDSFSKNEAFCNTVKDAFEHLINLRQNRPAELIAKFLDEKLRAGNKGTSEEELEGMLDKVLVLFRFIQGKDVFEAFYKKDLAKRLLLGKSASIDAEKSMISKLKTECGSQFTNKLEGMFKDIELSKEINESFKQSSQARTKLPSGIEMSVHVLTTGYWPTYPPMDVRLPHELNVYQDIFKEFYLSKYSGRRLMWQNSLGHCVLKAEFPKGRKELAVSLFQTVVLMLFNDAEKLSFQDIKDATSIEDKELRRTLQSLACGKVRVLQKLPKGREVDDNDSFSFNDQFAAPLYRIKVNAIQMKETVEENTSTTERVFQDRQYQVDAAIVRIMKTRKVLSHTLLITELFQQLKFPIKPSDLKKRIESLIDREYLERDKSNPQIYNYLA

SEQ ID NO: 2695 - protein, 803 aa, Elaeis guineensis
MKKFKSQPPAAAAVEREKNGLHPHSTHFDPAAAAEAAAQPAGEEDPMLVDQEDLKAGASTAITSTGVAANLSRKKATPPQPLAKKQLIIKLVKGKPTLPTNFEEDTWATLKSAITAIFLKQPDPCDSEKLYQAVSDLCLHKMGGNLYQRIEKECEVHISTTLFALVGQSPDLVVFLSLVEKCWQDFCDQMLMIRGIALYLDRTYVKQTPNVRSLWDMGLQLFRKHLSLCPEVEHKIVTGLLRLIEQERLGEAIDRTVLSHLLKMFTALGIYTESFEKPFLECTSEFYAAEGVKYMQQSDVPDYLKHVESRLHEEHERCLLYLDANTRKPLVASTEKQLLERHTSAILDKGFTMLMEANRVEDLQRMYTLFQRVNALELLRQALSSYIRGTGQGIVMDEEKDKDLVSYLLEFKASLDTILEESFFRNEAFSNTIKDSFEHLINLRQNRPAELIAKFLDEKLRAGNKGTSEEELEGTLDRVLVLFRFIQGKDVFEAFYKKDLAKRLLLGKSASIDAEKSMISKLKTECGSQFTNKLEGMFKDIELSKEINDSFKQSSQARTKLPTGIEMSVHVLTTGYWPTYPPMDVRLPHELNVYQDIFKEFYLSKHSGRRLMWQNSLGHCVLKAEFPKGKKELAVSLFQTVVLMLFNDAQKLSFQDIKDSTGIDDKELRRTLQSLACGKVRVLQKIPKGREVEDDDTFVFNEEFSAPLYRIKVNAIQMKETVEENTSTTERVFQDRQYQVDAAIVRIMKTRKVLSHTLLITELFQQLKFPIKPADLKKRIESLIDREYLERDKNNPQIYNYLA

SEQ ID NO: 2696 - protein, 763 aa, Ambrosia trifida
MKKAKSQQFDNNNPPSLHDPSSMIVDPSQNDAVRSTAGFTANLARKKATPPQPAKKLVIKLLKAKPTLPSNFEETTWVVLKSAISAIFLKQPDHCDLEKLYQAVNDLCLHKMGGSLYERIEKECEAHISSAIQSLVGQSEDLVVFLSLVQKTWQDFCDQMLMIRGIALYLDRTYVKQTPSVRSLWDMGLQLFWKHLSQASEVEHKTVFGLLKMIESERLGEAVDRTLLSHLLKMFTALGIYSESFEKPFLDCTSEFYAAEGVKYMQHSDVPDYLKHVEVRLHEENDRCLLYLDASTRKPLVATAEKQLLELHISAILDKGFTMLMDGNRTHDLRRMYTLFSRVNALESLRHALSAYIRKTGQGIVTDEEKDKDMVSSLLEFKMSLDKVWEDSFSKNDVFSNTIKEAFEHLINLRQNRPAELIAKFLDEKLRAGNKGTSEEELEGTLDKVLVLFRFIQGKDVFEAFYKKDLAKRLLLGKSASIDAEKSMISKLKTECGSQFTNKLEGMFKDIELSKEINESFKQSSQARTKLPSGIEMSVHVLTTGYWPTYPPMDVRLPHELNVYQDIFKEFYLSKYSGRRLMWQNSLGHCVLKAEFPKGKKELAVSLFQTVVLMLFNDAQKLSFQDIKDATNIEDKELRRTLQSLACGKVRILQKMPKGREVDDNDSFMFNDVFTAPLYRIKVNAIQLKETVEENASTTERVFQDRQYQVDAAIVRIMKTRKILSHTLLITELFQQLKFPIKPVDLKKRIESLIDREYLERDK

SEQ ID NO: 2697 - protein, 791 aa, Brassica oleracea
MSLPNKRSTCPAAASSASTTDSSYSPPPPMKKSKNGLHTPSDKVPFPMEDEDPTPSAAANLSRKKATLPHPTKKLVIKLNKAKPTLPTNFEDTTWANLQSAIRAIFLKKPFSFDLERLYQAVDDLCLHKLEGKLYERMQKECEEHISAALHSLVGQDTDLSVFLSLVEKCWQDFCDQMLMIRSIALSLDRKYVIQNPNVRSLWEMGLQLFRKHLSLSPDVEQRTVTALLRMIEKERLAEAVNRTLLSHLLKMFTALGIYTESFEKPFLECTSEFYAAEGMKYMQQYDVPEYLKHVEGRLHEENEKCILYIDASTRKPLISTVEKQLLERHIVAILDKGFTPLMDGRRTEDLQRMYTLFSRVSALESMRQALSSYTRKTGQKIVMDEEKDKDMVQSLLDFKACLDIVWEDSFCKNESFGNTIKDSFEHLINLRQNRPAELIAKFLDEKLRAGNKGTSEEELESTLEKVLVLFRFIQGKDVFEAFYKKDLAKRLLLGKSASIDAEKSMISKLKTECGSQFTNKLEGMFKDIELSKEINESFKQSSQARTKLPSGIEMSVHVLTTGYWPTYPPMDVKLPHELNVYQDIFKEFYLSKYSGRRLMWQNSLGHCVLKADFSKGKKELAVSLFQAVVLMLFNDAMKLSFEDIKDSTGIEDKELRRTLQSLACGKVRVLQKYPKGRDVQDGDEFDFNDTFTAPLYRIKVNAIQMKETVEENTSTTERVFQDRQYQIDAAIVRIMKTRKVLSHTLLITELFQQLKFPIKPADLKKRIESLIDREYLERDKTNPQIYNYLA

SEQ ID NO: 2698 - protein, 823 aa, Rosmarinus officinalis
MSHPASSTSTSNPSKRSSSSPHSAAAAAPILPAMKKAKSQSQHNTPHVHFSESTALSPMIEDNPSDAALEACSPSSAFGRTGAASGGGVTANLSRKKATLPQPTKKLVIKLNKAKPMLPIDFEENTWATLKSAISAIFLKQPNPCDLEKLYQAVNDLCLHKMGGSLYQRIEKECETYISAALQSLVGQSEDLVVFLSLVQKRWQDFCDQMLMIRGIALYLDRTYVKQTPNVRSLWDMGLQLFHKHLSLASEVERKTVFGLLKMIESERLGEAVDRTLLNHLLKMFTALGIYPESFEKPFLEGTSEFYAAEGVKYMQQADVPDYLKHVEMRLQEENERCLIYLDASTRKPLVATAERQLLVHHITAILDKGFMTLMDGKRIEDLQRMYMLFSRVDALESLRQSLNQYIRRTGQSIVMDEEKDRDMVSSLLEFKDNLDRIWEESFSKNEAFSNTIKDAFEHLINIRQNRPAELIAKFVDEKLRAGNKGTSEEELEGTLDKVLVLFRFIQGKDVFEAFYKKDLAKRLLLSKSASIDAEKSMITKLKTECGSQFTNKLEGMFKDIELSKEINESFKQSSQARTKLPSGIEMSVHVLTTGYWPTYPPMDVRLPHELNVYQDIFKEFYLSKYSGRRLMWQNSLGHCVLKADFPKGKKELAVSLFQTVVLMLFNDAQNLCFQDIKESTGIEDKELRRTLQSLACGKVRVLQKIPKGRDVDDEDSFVFNDQFTAPLYRIKVNAIQLKETVEENTSTTERVFQDRQYQVDAAIVRIMKTRKMLSHTLLITELFQQLKFPIKPADLKKRIESLIDREYLERDKNNPQIYNYLA

SEQ ID NO: 2699 - protein, 777 aa, Brassica oleracea
MSLPTKRSTCPPMKKAKNGLHAPSADKVGFPMEEEEEEDPTPSAANLSRKKATLPQPSKKLVIKLNKAKPSLPTNFEDTTWDNLQSAIRAIFLKHPFPFDLERLYQAVDNLCLHKLEGKLYKRIEKECEEHISVALQSLVGQDTDLSVFLSLVEKCWQDFCDQMLMIRSIALSLDRKYVIQNPNIRSLWEMGLQLFRKHLSLSPDVEQRTVTALLRMIEKERLAEAVNRTLLSHLLKMFTALGIYTESFEKHFLECTSEFYAAEGMKYMQQYDVPEYLKHVEGRLHEENERCILYIDPSTRKPLISTIEKQLLERHTVAILDKGFTPLMDGRRTEDLQRMYTLFSRVNALESLRQALSSYIRKTGQKIVMDEEKDKDMVQSLLDFKASLDIVWEESFRKNESFGNTIKDSFEHLINLRQNRPAELIAKFLDEKLRAGNKGTSEEELESTLEKVLVLFRFIQGKDVFEAFYKKDLAKRLLLGKSASIDAEKSMISKLKTECGSQFTNKLEGMFKDIELSKEINESFKQSSQARTKLPSGIEMSVHVLTTGYWPTYPPMDVKLPHELNVYQDIFKEFYLSKYSGRRLMWQNSLGHCVLKADFTKAKKELAVSLFQAVVLMLFNDAMKLSFEDIKDSTGIEDKELRRTLQSLACGKVRILHKYPKGRDVQDGDEFDFNDTFTAPLYRIKVNAIQMKETVEENTSTTERVFQDRQYQIDAAIVRIMKTRKVLSHTLLITELFQQLKFPIKPADLKKRIESLIDREYLERDKSNPQIYNYLA

SEQ ID NO: 2700 - protein, 825 aa, Flaveria ramosissima
MSQPSNNNRKHSSTTCTSPPPQSTHTTTGGGGPHFPAMKKAKSQAVSCSLDNKNGFQSHQFDSNSSVQDPSSMIVDPTDNDGGRASSAGGFTANLARKKATPPQPAKKLVIKLVKAKPTLPTNFEENTWAVLKSAINAIFLKQPDSCDLEKLYQAVNDLCLHKMGGSLYQRIERECESHISSALQSLVGQSEDLVVFLSLVHKTWQDFCDQMLMIRGIALYLDRTYVKQTPSVRSLWDMGLQLFRKHLSLASEVEHKTVFGLLKMIESERLGEAVDRTLLNHLLKMFTALGIYSESFEKPFLECTLEFYAAEGVKYMQNSDVPDYLKHVEVRLHEEHDRCLLYLDASTRKPLVATAERQLLELHISAILDKGFTMLMDGNRTQDLRRMYSLFSRVNALESLRVALSSYIRKTGQGIVTDEEKDKDMVPSLLEFKASLDKIWEESFSKNDVFCNTIKEAFEHLINLRQNRPAELIAKFLDEKLRAGNKGTSEEELEGTLDKVLVLFRFIQGKDVFEAFYKKDLAKRLLLGKSASIDAEKSMISKLKTECGSQFTNKLEGMFKDIELSKEINESFKQSSQARMKLPSGIEMSVHVLTTGYWPTYPPMDVRLPHELNVYQDIFKEFYLSKYSGRRLMWQNSLGHCVLKAEFAKGKKELAVSLFQTVVLMLFNDAQKLSFEDIKDATGIEDKELRRTLQSLACGKVRVLQKIPKGRDVEDNDTFMFNDGFTAPLYRIKVNAIQLKETVEENASTTERVFQDRQYQVDAAIVRIMKTRKMLSHTLLITELFQQLKFPIKPVDLKKRIESLIDREYLERDKSNPQIYNYLA

SEQ ID NO: 2701 - protein, 764 aa, Papaver somniferum
MILEDNIIKNHDILGGAGSSSGGGGGCSRAIAANLSRKKATPPQPAKKLVIKLVKEKPKLPTNFEENTWGTLKSAISAIFLKQPDPCDSEKLYQAVCNLCEHKMGGNLYKKIEKECEAHISTALQNLVGQSPDLVVFLSLVEKCWQDLCDQMLMIRGIALYLDRTYVKQTPNVRSLWDMGLQLFCKHLSLLPEVGHKTVTGLLRLIERERLGEAIDRTLVNHLLKMFNALGIYSESFEKPFLVGTSEFYASEGAKYMQQSDVPDYLKHVELRLHEEHERCLLYLDAGTRKPLIATTERQLLERHISAILDKGFTMLMDGNRVEDLRRMYALFSRVNAFESLRQALSSHIRVSGQNFVMDEEKDKDLVSSLLSFKASLDMIWEESFSKNETFSNTIKDAFEHLINLRQNRPAELIAKFLDEKLRAGNKGASEEELEGILDKILVLFRFIQGKDVFEAFYKKDLAKRLLLGKSASIDAEKSMISKLKTECGSQFTNKLEGMFKDIELSKEINESFKQSSQARTKLPSGIELSVHVLTTGYWPTYPPMDVRLPHELNVYQDIFKEFYLSKYSGRRLMWQNSLGHCVLKANFPKGKKELSVSLFQTVVLMLFNDAQKLSFQDIKDSTGIEDKELRRTLQSLACGKVRVLQKFPKGRDVEDGDSFVFHEEFSAPLYRIKVNAIQMKETVEENTSTTERVFQDRQYQVDAAIVRIMKTRKVLSHTLLITELFQQLKFPIKPVDLKKRIESLIDREYLERDKNNPQIYNYL

SEQ ID NO: 2702 - protein, 807 aa, Ricinus communis
MSLPTKRSATATSSSSTSSAAANSFPPMKKAKSQAVSACSPLDTTTNKNGIHHFNPSTTAAAENDVVFDPSSMMSLDDDPKLDDDHHRSHHHHPPAAANLSRKKATPPQPAKKLVIKLVKAKPTLPINFEEDTWAKLQSAIKAIFLKQPDSCDLEKLYQAVNDLCLHKMGGNLYQQIEKECEAHISAALRSLVGQSPDLVVFLSLVERCWQDLCDQMLMIRGIALYLDRTYVKQTPNVRSLWDMGLQLFRKHLSLSPEVEHKTVTGLLRMIESERLGEAVDRTLLNHLLKMFTALGIYAESFERPFLECTSEFYAAEGMKYMQQSDVPDYLKHVEIRLHEEHERCLLYLDASTRKPLIATAERQLLERHISAILDKGFMMLMDGHRIEDLKRMYSLFSRVNALESLRQALSSYIRRAGQAVVMDEEKDKDMVSSLLEFKASLDTIWEESFSKNEAFCNTIKDAFEHLINMRQNRPAELIAKFLDEKLRAGNKGTSEEELEGTLDKVLVLFRFIQGKDVFEAFYKKDLAKRLLLGKSASIDAEKSMISKLKTECGSQFTNKLEGMFKDIELSKEINESFKQSSQARTKLPSGIEMSVHVLTTGYWPTYPPMDVRLPHELNVYQDIFKEFYLSKYSGRRLMWQNSLGHCVLKAEFSKGKKELAVSLFQTVVLMLFNDAQKLSFQDIKDATGIEDKELRRTLQSLACGKVRVLQKLPKGRDVEDDDSFVFNEGFTAPLYRIKVNAIQMKETVEENTSTTERVFQDRQYQVDAAIVRIMKTRKVLSHTLLITELFQQAKCFPLYLSQQSST

SEQ ID NO: 2703 - protein, 800 aa, Cocos nucifera
MKKFKSQPPAAATVEREKNGLHPHSAHFDPAAAAAQPAEEEDPMLVDQEDLKAGASAAITSTGVAANLSRKKATPPQPLAKKQLVIKLVKGKPTLPTNFEEDTWATLKSAITAIFLKQPDPCDSEKLYQAVSDLCLHKMGGNLYQRIQKECEVHVSATLSSLVGQSPDLVVFLSLVEKCWQDFCDQMLMIRGIALYLDRTYVKQTPNVRSLWDMGLQLFRKHLSLCSEVEHKIVTGLLRLIERERLGEAIDRTVLSHLLKMFTALGIYTESFEKPFLECTSEFYAAEGVKYMQQSDVPDYLKHVESRLHEEHERCLLYLDANTRKPLVATAEKQLLERHTSAILDKGFTMLMEANRVQDLQRMYMLFQRVNALELLRQALSSYVRGSGQGIIMDEEKDKDLVSYLLEFKASLDTIWEESFFRHEAFSNTIKDSFEHLINLRQNRPAELIAKFLDEKLRAGNKGTSEEELEGTLDKVLVLFRFIQGKDVFEAFYKKDLAKRLLLGKSASIDAEKSMISKLKTECGSQFTNKLEGMFKDIELSKEINDSFKQSSQARTKLPTGIEMSVHVLTTGYWPTYPPMDVRLPHELNVYQDIFKEFYLSKYSGRRLMWQNSLGQCVLKAEFPKGKKELAVSLFQTVVLMLFNDAQKLSFQDIKDSTGIDDKELRRTLQSLACGKVRVLQKIPKGREVEDDDSFVFNEEFSAPLYRIKVNAIQMKETVEENTSTTERVFQDRQYQVDAAIVRIMKTRKVLSHTLLITELFQQLKFPIKPADLKKRIESLIDREYLERAKNNPQIYNYLA

SEQ ID NO: 2704 - protein, 803 aa, Elaeis guineensis
MKKAKCQPAAAAAAAAVSVEREKNGLHVHPTRYDPAAAQSAEEEDSMLLDQEDLKAGASTAITTTGVAANLSRKKATPPQPSTKKQLVIKLVKGKPTLPTNFEEDTWATLKSAITAIFLKQPDPCDSEKLYQAVSDLCLHKMGGNLYQRIQKECEVHISATLSSLVGQSPDLVVFLSLVEKCWQDFCDQILMIRGIALYLDRTYVKQTPNVRSLWDMGLQLFRKHLSLCSEVEHKIVTGLLRLIERERLGEAIDRTLLSHLLKMFTALGIYTESFEKPFLECTSEFYAAEGVKYMQQSDVPDYLKHVESRLHEEHERCLLYLDANTRKPLVATAEKQLLERHTSAILDKGFTMLMEANRVNDLQRMYMLFQRVNALELLRQALSSYVRGSGQGIIMDEEKDKDLVSYLLEFKASLDTIWEESFFRNEAFSNTIKDSFEHLINLRQNRPAELIAKFLDEKLRAGNKGTSEEELEGTLDKVLVLFRFIQGKDVFEAFYKKDLAKRLLLGKSASIDAEKSMISKLKTECGSQFTNKLEGMFKDIELSKEINDSFKQSSQARTKLPTGIEMSVHVLTTGYWPTYPPMDVRLPHELNVYQDIFKEFYLSKYSGRRLMWQNSLGQCVLKAEFPKGKKELAVSLFQTVVLMLFNDTQKLSFQDIKDSTGIDDKELRRTLQSLACGKVRVLQKIPKGREVEDDDSFVFNEEFSAPLYRIKVNAIQMKETVEENTSTTERVFQDRQYQVDAAIVRIMKTRKVLSHTLLITELFQQLKFPIKPADLKKRIESLIDREYLERDKNNPQIYNYLA

SEQ ID NO: 2705 - protein, 785 aa, Chrysanthemum coronarium
MKKAKSQVGSSSSSSSHSFDNKNGFQYQIENTNTNSGDAMVEDPVEMTSSGYAANLARKKATVPVPNKKLVIKLKGKPAMPTNLEEDRWTVLKSAISAIFLKQPGSCDLEKLYQAVNDLCLWKMGGSLYQRIERECEAHISGALQSLVGQSEDLVVFLSLVQKTWQDFCDQMLMIRSIALFLDRTYVKQSPNVKSLWDMGLQPFRKHLSLASEVEHKTVFGLLKMIETERLGETVDRTLLSHLLRMFTALGIYSESFEKPFLECTSEFYAAEGVRYMQNSDVPDYLKHVEVRLHEEHDRCLLYLDDHTRKPLVATAERQLLELHITAILDKGFTMLMDGNRTQDLKRMYTLFSRVGAIESLRQALSSYIRKTGQSIVTDEEKEKDMVSSLLEFKLSLDKIWEDSFSKNDVFSNTIKEAFEHLINLRQNRPAELIAKFLDEKLRAGNKGTSEEELEGTLDKVLVLFRFIQGKDVFEAFYKKDLAKRLLLGKSASIDAEKSMISKLKTECGSQFTNKLEGMFKDIELSKEINESFRQSSQARTKLPSGIELSVHVLTTGYWPTYPPMDVRLPHELNVYQDIFKEFYLSKYSGRRLMWQNSLGHCVLKAEFPKGKKELAVSLFQTVVLMLFNDAQKLSLQDIRDATSIEDKELRRTLQSLACGKVRVLQKIPKGREVDDNDSFEFNDAFTAPLYRIKVNAIQLKETVEENASTTERVFQDRQYQVDAAIVRIMKTRKTLSHTLLITELFQQLKFPIKPVDLKKRIESLIDREYLERDKSNPQIYNYLA

SEQ ID NO: 2706 - protein, 792 aa, Eutrema parvulum
MSLPTKRSTCSAASSASADSSFSSPPMKKAKNGLHTPSSQPNPADKVGFPMEEDPTPAAANLSRKKATLPQPTKKLVIKLNKAKPSLPTNFEDTTWENLQSAIRAIFLKKPFSFDLERLYQAVDNLCLHKLEGKLYERIEKECEEHISAALQSLVGQDTDLSVFLSLVEKCWQDFCDQMLMIRSIALSLDRKYVIQNPNVRSLWEMGLQLFRKHLSLSPEVEQRTVTALLRMIEKERLSEAVNRTLLSHLLKMFTALGIYTESFEKHFLECTSEFYAAEGMKYMQQYDVPEYLKHVEERLHEENERGILYIDASTRKPLISTIEKQLLERHILAILDKGFTSLMDGRRTEDLQRMYTLFSRVNALESLRQALSSYIRKTGQKIVMDEEKDKDMVQSLLDFKASLDIVWEESFSKNESFGNTIKDSFEHLINLRQNRPAELIAKFLDEKLRAGNKGTSEEELESTLEKVLVLFRFIQGKDVFEAFYKKDLAKRLLLGKSASIDAEKSMISKLKTECGSQFTNKLEGMFKDIELSKEINESFKQSSQARTKLPSGIEMNVHVLTTGYWPTYPPMDVKLPHELNVYQDIFKEFYLSKYSGRRLMWQNSLGHCVLKADFARGKKELAVSLFQAVVLMLFNDATKLSFEDIKDSTGIEDKELRRTLQSLACGKVRVLQKYPKGRDIHDADEFDFNDTFTASLYRIKVNAIQMKETVEENTSTTERVFQDRQYQIDAAIVRIMKTRKVLSHTLLITELFQQLKFPIKPADLKKRIESLIDREYLERDKNNPQIYNYLA

SEQ ID NO: 2707 - protein, 719 aa, Solanum lycopersicum
PFTHFSFLKAKPTLPTNFEENTWATLKSAISAIFLKQPDPCDLEKLYQAVNDLCLHKMGGNLYQRIEKECESHIAAALRSLVGQSEDLVVFLSLVERCWQDFCDQMLMIRGIALYLDRTYVKQTPNVRSLWDMGLQLFRKHLSLASEVEHKTVFGLLQMIETERLGEAVDRTLLNHLLKMFTALGIYAESFEKPFLERTSEFYAAEGVKYMQQSDVPDYLKHVEVRLHEEHDRCLLYLDASTRKPLIATAERQLLEQHISAILDKGFTVLMDGNRIEDLQRMYMLFCRVNDLESLRQALSSYIRRTGQSIVLDEEKDKDMVPSLLEFKASLDTIWEESFFKNEAFSNTIKDAFEHLINIRQNRPAELIAKFLDEKLRAGNKGTSEEELEGTLDKVLVLFRFIQGKDVFEAFYKKDLAKRLLLGKSASIDAEKSMISKLKTECGSQFTNKLEGMFKDIELSKEINESFKQSSQARTKLPTGIEMSVHVLTMGYWPTYPPMDVRLPHELNVYQDIFKEFYLSKYSGRRLMWQNSLGHCVLKAEYPKGKKELAVSLFQTVVLMLFNDAENLSFQDIKEATGIEDKELRRTLQSLACGKVRVLQKIPKGRDVEDDDTFVFNDQFTAPLYRIKVNAIQMKETVEENTSTTERVFQDRQYQVDAAIVRIMKTRKVLSHTLLITELFQQLKFPIKPADLKKRIESLIDREYLERDKNNPQIYNYLA

SEQ ID NO: 2708 - protein, 822 aa, Cichorium intybus
SNNNRKRSSTTCTSPPPSTPTAGGESGGGGAHFLTMKKAKSQAVSCSLDNKNGFQQHQFDNNSSAEPSSMIEDPTENDAGRASSAGGFTANLARKKATPPQPAKKLVIKLVKAKPTLPTNFEENTWAVLKSAISAIFLKQPDPCDLEKLYQAVNDLCLHKMGGSLYQRIERECEAHISAALQSLVGQSEDLVVFLSLVQKTWQDFCDQMLMIRGIALYLDRTYVKQTPTVRSLWDMGLQLFRKHLSLASEVEHKTVFGLLKMIESERLGEAVDRTLLNHLLKMFTALGIYSESFEKPFLDCTSEFYAAEGVKYMQYSDVPDYLKHVEVRLHEEHDRCLLYLDASTRKPLVATAEKQLLELHISAILDKGFTMLMDGNRTQDLRRMYTLLQRVNALESLRQALSSYIRKTGQGIVTDEEKDKDMVSSLLDFKMSLDKIWEDSFSKNDVFSNTIKEAFEHLINLRQNRPAELIAKFLDEKLRAGNKGTSEEELEGTLDKVLVLFRFIQGKDVFEAFYKKDLAKRLLLGKSASIDAEKSMISKLKTECGSQFTNKLEGMFKDIELSKEINESFKQSSQARTKLPSGIELSVHVLTTGYWPTYPPMDVRLPHELNVYQDIFKEFYLSKYNGRRLMWQNSLGHCVLKAEFPKGKKELAVSLFQTVVLMLFNDAQKLSFQDIKDATSIEDKELRRTLQSLACGKVRVLQKIPKGREVDDNDSFMFNDVFTAPLYRIKVNAIQLKETVEENASTTERVFQDRQYQVDAAIVRIMKTRKVLSHTLLITELFQQLKFPIKPVDLKKRIESLIDREYLERDKSNPQIYNYLA

SEQ ID NO: 2709 - protein, 828 aa, Spinacia oleracea
MSPPNHKRPASASTATSNSNLTSATGTSFSPPMKKPKPHSQSLDSKNGLHHSFNSATDDADDHGGSMIMDDDLKPDGIVSPSSNSRAPITAGVTANLSRKKATPPNPSTKKLVIKLVKAKPTLPPNFEEDTWAILKSAINAIFLKQPDSCDLEKLYQAVNDLCLHKMGVSLYQRIEKECEAHVSAVLQSLVGQSPDLVVFLSLVEKCWQDLCDQMLMIRGIALYLDRTYVKQTPNVKSLWDMGLQLFRKHLSLCPEVEHKTVTGLLRMIERERLGEAVDRTLLNHLLKMFTALGIYQESFEKPFLVCTEEFYAVEGAKYMQQSDVPDYLKHVEIRLHEEQERCLLYLDASTRKPLISTAEKQLLERHISAILDKGFMMLMDGSRVDDLQRMYNLFTRVNALESLRQAISSYIRKAGQATVMDEEKDKDMVSCLLEFKATLDKIWEESFSKNESFGNTIKDSFEYLINLRQNRPAELIAKFLDEKLRAGNKGTSEEELEGTLDKVLVLFRFIQGKDVFEAFYKKDLAKRLLLGKSASIDAEKSMISKLKTECGSQFTNKLEGMFKDIELSKEINESFKQSSQARTKLPSGIEMSVHVLTTGYWPTYPPMDVRLPHELNVYQDIFKEFYLSKYSGRRLMWQNSLGHCVLKADFPKGKKELAVSLFQAVVLMLFNDAENLSFQDMKDATGIEDKELRRTLQSLACGKVRVLQKIPKGREVENEDSFVFNDGFAAPLYRIKVNAIQMKETVEENTSTTERVFQDRQYQVDAAIVRIMKTRKVLSHTLLITELFQQLKFPIKPADLKKRIESLIDREYLERDKNNPQIYNYLA

SEQ ID NO: 2710 - protein, 793 aa, Eutrema halophilum
MSLPTKRSTCSSASPASTDSSYSSPPPMKKAKNGLHTPSSQPNAADKVGFPMEDDATPAAANLSRKKATLPQPSKKLVIKLNKAKPSLPTNFEEITWEKLQSAIRAIFLKKPVSFDLERLYQAVDNLCLHKLEGKLYERIEKECEEHISAALQSLVGQDTDLSVFLSLVENCWQDFCDQMLMIRSIALSLDRKYVIQNPNVRSLWEMGLQLFRKHLALSPEVEQRTVTALLRMIEKERLAEAVNRTLLSHLLKMFTSLGIYTESFEKHFLECTSEFYAAEGMKYMQQYDVAEYLKHVEGRLHEENERCILYIDAGTRKPLIATIEKQLLERHILAVIDKGFSPLMDGRRTEDLQRMYTLFSRVNALESLRQALSSYIRKTGHKIVMDEEKDKDMVQSLLDFKASLDIVWEESFCKNESFGNTIKDSFEHLINLRQNRRAELIAKFLDEKLRAGNKGTSEEELESTLEKVLVLFRFIQGKDVFEAFYKKDLAKRLLLGKSASIDAEKSMISKLKTECGSQFTNKLEGMFKDIELSKEINESFKQSSQARTKLPSGIEMSVHVLTTGYWPTYPPMDVKLPHELNVYQDIFKEFYLSKYSGRRLMWQNSLGHCVLKADFSKGKKELAVSLFQAVVLMLFNDAMKLSFEDIKDSTGIEDKELRRTLQSLACGKVRVLQKYPKGRDVQDGDEFDFNDTFTAPLYRIKVNAIQMKETVEENTSTTERVFQDRQYQIDAAIVRIMKTRKVLSHTLLITELFQQLKFPIKPADLKKRIESLIDREYLERDKNNPQIYNYLA

SEQ ID NO: 2711 - protein, 796 aa, Amborella trichopoda
MKKAKSLSSSASQPPFSSSSSDKQNPRFLDEDAMLVDRKDEVIPVPAAQAVALSAGCSGTGMAANLSRKKATPPQPTKKLVIRPFKDKPKLPTNFEEDTWAKLKSAISAILLKQPVSCSLEELYQAVNDLCLHKMGGNLYKRIQKECEEHISKTIQSLVGQSPDLVVFLSLVEKCWQDLCDQLLMIRGIALYLDRTYVIQTSNVRSLWDMGLQLFRKHLSLCPEVEHKTVTGLLRLIERERLGEAIDRALLNHLLRMFTSLGIYTESFEKPFLECTSEFYASEGVKYMQQSDVPDYLKHVELRLHEEHERCFVYLDAATRKPLVLTAERQLLVNHTAAILDKGFTLLMDANRIPDLHRMYVLFAKVHALELLRHALSSYIRSTGQSIVMDEEKDKDMVSCLLEFKARLDTIWEQSFNYNDVFSNTIKDAFEHLINLRQNRPAELIAKFLDEKLRAGNKGTSEEELEGTLDKVLVLFRFIQGKDVFEAFYKKDLAKRLLLGKSASIDAEKSMISKLKTECGSQFTNKLEGMFKDIELSKEINESFKQSSQARTKLPSGIEMSVHVLTTGYWPTYPPMDVRLPHELNVYQDIFKEFYLSKYSGRRLMWQNSLGHCVLKAEFPKGKKELAVSLFQTVVLMLFNDTSKLSFQDIKDATCIEDKELRRTLQSLACGKVRVLQKLPKGRDVEDEDSFLFNEEFSAPLYRLKVNAIQMKETVEENTTTTERVFQDRQYQVDAAIVRIMKTRKVLSHTLLITELFQQLKFPIKPADLKKRIESLIDREYLERDKSNPQIYNYLA

SEQ ID NO: 2712 - protein, 791 aa, Arabidopsis lyrata
MSLPTKRSTFSAASASDDSSYSSPPMKKAKNDLHHSPQHPNTADKVGFHMEEDPTPAAANLSRKKATLPQPTKKLVIKLNKAKPTLPTNFEETTWEKLQSAIRAIFLKKPFSFDLESLYQAVDNLCLHKLEGKLYDQIEKECEEHISAALQSLVGQNTDLTVFLSLVEKCWQDFCDQMLMIRSIALTLDRKYVIQNPNVRSLWEMGLQLFRKHLSLAPEVEQRTVKGLLSMIEKERLAEAVNRTLLSHLLKMFTALGIYMDSFEKPFLEGTSEFYAAEGMKYMQQSDVPEYLKHVEGRLHEENERCILYIDAVTRKPLIATVERQLLERHILVVLDKGFTTLMDGRRTEDLQRMQTLFSRVNALESLRQALSSYVRKTGQKIVMDEEKDKDMVQSLLDFKASLDVIWEESFNKNESFGNTIKDSFEHLINLRQNRPAELIAKFLDEKLRAGNKGTSEEELESTLEKVLVLFRFIQGKDVFEAFYKKDLAKRLLLGKSASIDAEKSMISKLKTECGSQFTNKLEGMFKDIELSKEINESFKQSSQARTKLPSGIEMSVHVLTTGYWPTYPPMDVKLPHELNVYQDIFKEFYLSKYSGRRLMWQNSLGHCVLKADFSRGKKELAVSLFQAVVLMLFNDAMKLSFEDIKDSTSIEDKELRRTLQSLACGKVRVLQKNPKGRDVEDGDEFEFNDDFAAPLYRIKVNAIQMKETVEENTSTTERVFQDRQYQIDAAIVRIMKTRKVLSHTLLITELFQQLKFPIKPADLKKRIESLIDREYLEREKSNPQIYNYLA

SEQ ID NO: 2713 - protein, 719 aa, Solanum phureja
PFTHFSFLEAKPTLPTNFEENTWATLKSAISAIFLKQPDPCDLEKLYQAVNDLCLHKMGGNLYQRIEKECESHIAAALRSLVGQSEDLVVFLSLVERCWQDFCDQMLMIRGIALYLDRTYVKQTPNVRSLWDMGLQLFRKHLSLASEVEHKTVFGLLQMIETERLGEAVDRTLLNHLLKMFTALGIYAESFEKPFLERTSEFYAAEGVKYMQQSDVPDYLKHVEVRLHEEHDRCLLYLDASTRKPLIATAERQLLERHISAVLDKGFTVLTDGNRIEDLQRMYMLFCRVNDLESLRQALSSYIRRTGQSIVLDEEKDKDMVASLLEFKASLDTIWEESFSKNEAFSNTIKDAFEHLINIRQNRPAELIAKFLDEKLRAGNKGTSEEELEGTLDKVLVLFRFIQGKDVFEAFYKKDLAKRLLLGKSASIDAEKSMISKLKTECGSQFTNKLEGMFKDIELSKEINESFKQSSQARTKLPTGIELSVHVLTMGYWPTYPPMDVRLPHELNVYQDIFKEFYLSKYSGRRLMWQNSLGHCVLKAEYPKGKKELAVSLFQTVVLMLFNDAENLSFQDIKEATGIEDKELRRTLQSLACGKVRVLQKIPKGRDVEDDDTFVFNDQFTAPLYRIKVNAIQMKETVEENTSTTERVFQDRQYQVDAAIVRIMKTRKVLSHTLLITELFQQLKFPIKPADLKKRIESLIDREYLERDKNNPQIYNYLA

SEQ ID NO: 2714 - protein, 738 aa, Fragaria vesca
RAQPDNLSRKKAQPPQPGKKQFVIKPFKAKPAVPKNLEEETWEILKSAICAIFEKKPVSCVLEELYQAVYNLCVHKMGGSLYQRIEKECERHIAAALQSLVGQSPDLVVFLSLVERCWQDLCAQILMIRDIALYLDRTYVKQTPNVRSLWDMGLQLFRKHLSLSPEVEHKIVTGLLRMIEKERLGEAVARTLINHLTKMFIALGMYWESFEKPFLECSSEFYGTEGVKYMQQSDVPEYLKHVEKRLHEEHERCLLYLDASTRKPLVATAEKQLLELHIPGILDKGFTMLMDGNRIEDLQRMYTLFLRVNALEALKQALSSYIRKTGQKMIMDEEKDKDMVSSLLEFKASLDTIWEESFSKNEAFCITIKDAFEHLINLRQNRPAELIAKFLDEKLRAGNKGTSEEELEGTLDKVLVLFRFIQGKDVFEAFYKKDLAKRLLLGKSASIDAEKSMISKLKTECGSQFTNKLEGMFKDIELSKEINESFRQSSQARTKLPSGIELSVHVLTSGYWPTYTPMDVRLPHELNVYQDIFKEFYLSKYSGRRLMWQNSLGHCVLKAEFPKGRKELAVSLFQTVVLMLFNDAEKLSFQDIKDSTSIEDKELRRTLQSLACGKVRVLQKLPKGRDVEDNDSFTFNDTFTAPLYRIKVNAIQMKETVEENTSTTERVFQDRQYQIDAAIVRIMKTRKLLSHTILITELFQQLKFPIKPADLKKRIESLIDREYLERDKNNPQVYNYLA

SEQ ID NO: 2715 - protein, 806 aa, Amorphophallus konjac
MKKAKSQQSPAPACPLEKNGLQQQHHHLDADDGVAAAHAADEDAMLLDQDDLKAAAADDAIPAPAVTTGTAANLSRKKAVPLQPAAKKQLVIKLVKGKPKLPTNFEEDTWATLKSATTAIFLKQPDPCDLEKLYQAVSDLCLHKMGGNLYQRIQRECEVHISTALQSLVGQSPDLVVFLCLVEKCWQDFCDQMLMIRGIALYLDRTYVKQTPNVRSLWDMGLQLFRKHLSLSVEVEHKTVTGLLRLIEKERSGEAIDRTLLNHLLKMFTALGIYTESFEKPFLECTSEFYAAEGVKYMQESDVPDYLKHVELRLHEEHERCLLYLDANTRKPLVATAERQLLARHISSILDKGFTVLMDGNRIEDLKRMYNLFSKVNALELLRQALSSYIRGTGQSIVMDEEKDKDLVSCLLEFKATLDTIWEESFSRNESFSNTIKDAFEHLINLRQNRPAELIAKFLDEKLRAGNKGTSEEELEGTLDKVLVLFRFIQGKDVFEAFYKKDLAKRLLLGKSASIDAEKSMISKLKAECGSQFTNKLEGMFKDIELSKEINDSFKQSSQARTKLPSGIEMSVHVLTTGYWPTYPPMDVRLPHELNVYQDIFKEFYLSKYSGRRLMWQNSLGHCVLKAEFPKGKKELAVSLFQTVVLMLFNDTQKLTFQDIKDSTAIEDKELRRTLQSLACGKVRVLQKFPKGREVEDEDTFVFNEDFSAPLYRIKINAIQMKETVEENASTTERVFQDRQYQVDAAIVRIMKTRKVLSHTLLITELFQQLKFPIKPADIKKRIESLIDREYLERDKSNPQIYNYLA

SEQ ID NO: 2716 - protein, 789 aa, Cocos nucifera
AAAAVEREKNGLRLHPARFEPAATQPAEEEDSMLVDQEDLKAGASTAITATGVAANLSRKKATPPQPSTKKQLVIKLVKGKPTLPTNFEEDTWATLKSAITAIFLKQPDPCDSEKLYQAVSDLCLHKMGGNLYQRIQKECEVHVSATLSSLVGQSPDLVVFLSLVEKCWQDFCDQMLMIRGIALYLDRTYVKQTPNVRSLWDMGLQLFRKHLSLCSEVEHKIVTGLLRLIERERLGEAIDRTVLSHLLKMFTALGIYTESFEKPFLECTSEFYAAEGVKYMQQSDVPDYLKHVESRLHEEHERCLLYLDANTRKPLVATAEKQLLERHTSAILDKGFTMLMEANRVQDLQRMYMLFQRVNALELLRQALSSYVRGSGQGIIMDEEKDKDLVSYLLEFKASLDTIWEESFFRHEAFSNTIKDSFEHLINLRQNRPAELIAKFLDEKLRAGNKGTSEEELEGTLDKVLVLFRFIQGKDVFEAFYKKDLAKRLLLGKSASIDAEKSMISKLKTECGSQFTNKLEGMFKDIELSKEINDSFKQSSQARTKLPTGIEMSVHVLTTGYWPTYPPMDVRLPHELNVYQDIFKEFYLSKYSGRRLMWQNSLGQCVLKAEFPKGKKELAVSLFQTVVLMLFNDAQKLSFQDIKDSTGIDDKELRRTLQSLACGKVRVLQKIPKGREVEDDDSFVFNEEFSAPLYRIKVNAIQMKETVEENTSTTERVFQDRQYQVDAAIVRIMKTRKVLSHTLLITELFQQLKFPIKPADLKKRIESLIDREYLERDKNNPQIYNYLA

SEQ ID NO: 2717 - protein, 828 aa, Flaveria ramosissima
MSQPSNNNRKHSSTTCTSPPPPSTSTTTGGGGGGGPHFPAMKKAKSQAVSCSLDNKNGFQPHQFDSNSSVQDPSSMIVDPTDNDGGRASSAGGFTANLARKKATPPQPAKKLVIKLVKAKPTLPTNFEENTWAVLKSAINAIFLKQPDSCDLEKLYQAVNDLCLHKMGGSLYQRIERECESHISSALQSLVGQSEDLVVFLSLVHKTWQDFCDQMLMIRGIALYLDRTYVKQTPSVRSLWDMGLQLFRKHLSLASEVEHKTVFGLLKMIESERLGEAVDRTLLNHLLKMFTALGIYSESFEKPFLECTLEFYAAEGVKYMQNSDVPDYLKHVEVRLHEEHDRCLLYLDASTRKPLVATAERQLLELHISAILDKGFTMLMDGNRTQDLRRMYSLFSRVNALESLRVALSSYIRKTGQGIVTDEEKDKDMVPSLLEFKASLDTIWEESFSKNDVFCNTIKEAFEHLINLRQNRPAELIAKFLDEKLRAGNKGTSEEELEGTLDKVLVLFRFIQGKDVFEAFYKKDLAKRLLLGKSASIDAEKSMISKLKTECGSQFTNKLEGMFKDIELSKEINESFKQSSQARMKLPSGIEMSVHVLTTGYWPTYPPMDVRLPHELNVYQDIFKEFYLSKYSGRRLMWQNSLGHCVLKAEFAKGKKELAVSLFQTVVLMLFNDAQKLSFEDIKDATSIEDKELRRTLQSLACGKFRVLQKIPKGRDVEDNDTFMFNDGFTAPLYRIKVNAIQLKETVEENASTTERVFQDRQYQVDAAIVRIMKTRKMLSHTLLITELFQQLKFPIKPVDLKKRIESLIDREYLERDKSNPQIYNYLA

SEQ ID NO: 2718 - protein, 826 aa, Chenopodium quinoa
MSPPNTKRPSSAASNTNTNNLSSSAFSSPMKKPKSYSQSLDSKNGLHHSFNSAADDDTDNAASMIVDDDLKSDAAAVSPSSNSRAPITAGATANLSRKKATPPNPSTKKLVIKLVKAKPTLPPNFEEDTWATLKSAINAIFLKQPDSCDLEKLYQAVNDLCLHKMGGSLYQRIEKECEAHVSAVLHSLVGQSPDLVVFLSLVEKCWQDLCDQMLMIRGIALYLDRTYVKQTPNVKSLWDMGLQLFRKHLSSCPEVEHKTVTGLLRMIERERLGEAVDRTLLNHLLKMFTALGIYQESFEKPFLACTEEFYAAEGAKYMQQSDVPDYLKHVEIRLHEEQERCLLYLDASTRKPLISTAEKQLLERHISAILDKGFMMLMDGSRVDDLHRMYSLFSRVDALESLRQALSSYIRKAGQATVMDEEKDKDMVSCLLEFKAALDKIWEESFSKTESFGNTIKDSFEYLINLRQNRPAELIAKFLDEKLRAGNKGTSEEELEGTLDKVLVLFRFIQGKDVFEAFYKKDLAKRLLLGKSASIDAEKSMISKLKTECGSQFTNKLEGMFKDIELSKEINESFKQSSQARTKLPSGIEMSVHVLTTGYWPTYPPMDVRLPHELNVYQDIFKEFYLSKHSGRRLMWQNSLGHCVLKADFPKGKKELAVSLFQAVVLMLFNDAESLSFQDMKDATGIEDKELRRTLQSLACGKVRVLQKVPKGREVEDDDSFVFNDTFAAPLYRIKVNAIQMKETVEENTSTTERVFQDRQYQVDAAIVRIMKTRKVLSHTLLITELFQQLKFPIKPADLKKRIESLIDREYLERDKNNPQIYNYLA

SEQ ID NO: 2719 - protein, 786 aa, Brassica rapa
MSLPNKRSTCPAAASSASTTDSSYSSPPPMKKSKNGLHSPFPMEDEDPTPSAAANLSRKKATLPHPTKKLVIKLNKAKPTLPTNFEDTTWANLQSAIRAIFLKKPFSFDLERLYQAVDALCLHKLEGKLYERMQKECEEHISAALHSLVGQDTDLSVFLSLVEKCWQDFCDQMLMIRSIALSLDRKYVIQNPNVRSLWEMGLQLFRKHLSLSPDVEQRTVTALLRIIEKERLAEAVNRTLLSHLLKMFTALGIYTEGFEKPFLECTSEFYAAEGMKYMQQYDVPEYLKHVEGRLHEENEKCILYIDASTRKPLISTVEKQLLERHIVAILDKGFTPLMDGRRTEDLQRMYTLFSRVSALESMRQALSSYTRKTGQKIVMDEEKDKDMVQSLLDFKACLDIVWEDSFCKNESFGNTIKDSFEHLINLRQNRPAELIAKFLDEKLRAGNKGTSEEELESTLEKVLVLFRFIQGKDVFEAFYKKDLAKRLLLGKSASIDAEKSMISKLKTECGSQFTNKLEGMFKDIELSKEINESFKQSSQARTKLPSGIEMSVHVLTTGYWPTYPPMDVKLPHELNVYQDIFKEFYLSKYSGRRLMWQNSLGHCVLKADFSKGKKELAVSLFQAVVLMLFNDAMKLSFEDIKDSTGIEDKELRRTLQSLACGKVRVLQKYPKGRDVQDGDEFDFNDTFTAPLYRIKVNAIQMKETVEENTSTTERVFQDRQYQIDAAIVRIMKTRKVLSHTLLITELFQQLKFPIKPADLKKRIESLIDREYLERDKTNPQIYNYLA

SEQ ID NO: 2720 - protein, 792 aa, Arabidopsis thaliana
MSLPTKRSTFSAASASDDSSYSSPPMKKAKNDLHHSPQHPNTADKVVGFHMEEDPTPAAANLSRKKATLPQPTKKFVIKLNKAKPTLPTNFEENTWEKLQSAIRAIFLKKKISFDLESLYQAVDNLCLHKLDGKLYDQIEKECEEHISAALQSLVGQNTDLTVFLSRVEKCWQDFCDQMLMIRSIALTLDRKYVIQNPNVRSLWEMGLQLFRKHLSLAPEVEQRTVKGLLSMIEKERLAEAVNRTLLSHLLKMFTALGIYMESFEKPFLEGTSEFYAAEGMKYMQQSDVPEYLKHVEGRLHEENERCILYIDAVTRKPLITTVERQLLERHILVVLEKGFTTLMDGRRTEDLQRMQTLFSRVNALESLRQALSSYVRKTGQKIVMDEEKDKDMVQSLLDFKASLDIIWEESFYKNESFGNTIKDSFEHLINLRQNRPAELIAKFLDEKLRAGNKGTSEEELESVLEKVLVLFRFIQGKDVFEAFYKKDLAKRLLLGKSASIDAEKSMISKLKTECGSQFTNKLEGMFKDIELSKEINESFKQSSQARTKLPSGIEMSVHVLTTGYWPTYPPMDVKLPHELNVYQDIFKEFYLSKYSGRRLMWQNSLGHCVLKADFSKGKKELAVSLFQAVVLMLFNDAMKLSFEDIKDSTSIEDKELRRTLQSLACGKVRVLQKNPKGRDVEDGDEFEFNDEFAAPLYRIKVNAIQMKETVEENTSTTERVFQDRQYQIDAAIVRIMKTRKVLSHTLLITELFQQLKFPIKPADLKKRIESLIDREYLEREKSNPQIYNYLA

SEQ ID NO: 2721 - protein, 732 aa, Silene vulgaris
NLTRKKASLPNPSKKLVIKLVKAKPTLPPNFEEDTWATLKSAINAIFLKQPDSCDLEKLYQAVNDLCLHKMGGSLYTRIEKEFEANISAVLHSLVGQSPDLVVFLSLVEKCWQDLCEQMLMIRGIALYLDRTYVKQTPHVKSLWDMGLQLYRKHLYLCPEVEHKTVTGLLRMIEKERLGEGVDRTLLNHLLKMFTALGIYQESFEKPFLACTEEFYAAEGVKYMQQSDVPDYLKHVETRLHEEQERCLLYLDASTRKPLISTAEKQLLERHISAILDKGFMMLMDGSRIKDLHRMYNLFSRVNSLESLRQALSSHIRKSGQAIVMDQEKDSNMVSCLLEFKAALDKIWEESFSMNDSFSNTIKDSFEYLINLRQNRPAELIAKFLDEKLRAGNKGTSEEELEGTLDKVLVLFRFIQGKDVFEAFYKKDLAKRLLLGKSASIDAEKSMISKLKTECGSQFTNKLEGMFKDIELSKEINESFRQSSQARTKLPSGIEMSVHVLTTGYWPTYLPMNVRLPHELNVYQDIFKEFYLSKYNGRRLMWQNSLGHCVLKVDFPKGKKELAVSLFQAVVLMLFNDAEALSFQDIKDATGIEDKELRRTLQSLACGKVRVLLKEPKGRDVEDHDSFVFHEGFTAPLYRIKVNAIQMKETVEENTSTTERVFQDRQYQVDAAIVRIMKTRKVLSHTLLITELFQQLKFPVKPADLKKRIESLIDREYLERDKNNPQIYNYLA

SEQ ID NO: 2722 - protein, 793 aa, Prunus mume
MSHPTKRSSAINNNTISSTSSSLNPSSGPPMKKAKSQAVACSLDPSKNGLHHHHHHHPHTHPSQDSDNDVVFDPSTMALDEDLKSDDPSSRAVAANLSRKKAQPPQPTKKLVIKLLKAKPTLPTNFEEETWAKLKSAICAIFLKKPDSCDSEKLYQAVNDLCLHKMGGSLYQRIEKECERHIAAALQSLVGQSPDLVVFLSLVERCWQDLCDQMLMIRGIALYLDRTYVKQTPNVRSLWDMGLQLFRKHLSLSPEVEHKTVTGLLRLIEKERLGEAVARTLLNHLLKMFTALGIYSESFEKPFLECTSEFYAAEGMKYMQQADVPDYLKHVETRLHEEHERCLIYLDASTRKPLVATAEKQLLERHIPAILDKGFTLLMDGNRIEDLQRMYTLFSRVNALESLRQALSTYIRRTGQGMIMDEEKDREMVSSLLEFKASLDTIWEESFFKNEAFCNTIKDAFEHLINLRQNRPAELIAKFLDEKLRAGNKGTSEEELEGMLDKVLVLFRFIQLKTECGSQFTNKLEGMFKDIELSKEINESFKQSSQARTKLPSGIEMSVHVLTTGYWPTYPPMDVRLPHELNVYQDIFKEFYLSKYSGRRLMWQNSLGHCVLKAEFPKGKKELAVSLFQTVVLMLFNDAEKLSLQDIKDSTGIEDKELRRTLQSLACGKVRVLQKFPKGRDVEDDDTFTFNDGFTAPLYRIKVNAIQMKETVEENTSTTERVFQDRQYQVDAAIVRIMKTRKVLSHTLLITELFQQLKFPIKPADLKKRIESLIDREYLERDKNNPQIYNYLA

SEQ ID NO: 2723 - protein, 779 aa, Solanum lycopersicum
MKKAKSQAAATDDNKNGQQQQQHHHHHHKDEPCVSMIQYSGGGVTSNLSRKKATPPQPPKKQLVIKLNKAKPTLPTNFEENTWATLKSAISAIFLKQPDPCDLEKLYQAVTDLCLHKMGGSLYQRIEKECEAHIVAVLQSLVGQSEDLVVFLSVVQRCWQDFCDQMLMIRGIALYLDRTYVKQTPNGHSLWDMGLQLFRKHLCLASEVEHKIVFGLLQMIESERLGEAVDRALLNHLLKMFTALGIYAESFEKPFVERTSEFYAAEGVKYMQQSDVPDYLKHVELRLHEEHDRCLHYLDSSTRKPLISTTERQLLERHVAAILDKGFMMLMDGKRIEDLRRMYSLFPRVEALESLKQTLSLYIRKNGQSIVHDDEKDKDMVSSLLEFKASVDTIWEESFSKNEAFGNTIKDAFGHLINVCENRPAELIAKFLDEKLRAGNKGTSEEELEGILDKVLVLFRFIQGKDVFEAFYKKDLAKRLLLGKSASIDAEKSMISKLKTECGSQFTNKLEGMFKDIELSKEINESFKQSSQARKKLPTGIEMSVHVLTTGYWPTYPPMDVRLPHELNIYQDIFKEFYLSKYSGRRLMWQNSLGHCVLKAEFPKGKKELAVSLFQAVVLMLFNDAEKLSFLDMREATRIEDKELRRTLQSLACGKVRVLQKIPKGRDVEDDDTFVFNDQFTTPLYRIKVNAIQMKETVEENTNTTERVFQDRQYQVDAAIVRIMKTRKVLSHTLLITELFQQLKFPVKPADLKKRIESLIEREYLERDKNNPQVYNYLA

SEQ ID NO: 2724 - protein, 395 aa, Glycine max
MGSSVKLSRRALETEMPVMVQMQELQRGAKNALSLAQGVVYWQPPKQALEKVKELVSEPLISRYGNDEGIPELRAALVKKLRDENNLHKSSVMVTSGANQAFVNLVLTLCDPGDSVVMFAPYYFNAYMSFQMTGITNILVGPGSSDTLHPDADWLERILSENKPAPKLVTVVNPGNPSGTYIPEPLLKRISDLCKNAGSWLVVDNTYEYFMYDGLKHSCVEGNHIVNVFSFSKAYGMMGWRVGYIAYPSEVKDFAEQLLKVQDNIPICASILSQYLALYSLEVGPQWVLDQVKTLEKNREIVLEALSPLGEGSVKGGEGAIYLWAKLPDLDAHDDFDVVRWLANKHGVAVIPGKACGCPSNLRISFGGLTENDCRAAAERLKKGLEELVRDGLRE

SEQ ID NO: 2725 - protein, 395 aa, Vigna unguiculata
MSSLLKLSRRALETEMPVMVQMQELIRGSKNAVSLAQGVVHWQPPEQALKKVKELVSDPIVSRYGVDEGIPELRAALIKKLRDENNLHKSSVMVTAGANQAFVNLVLTLCDPDDSVVMFAPYYFNAYMSFQMTGVTNILVGPGSPDSLHPDADWLEKILSETKPPPKLVTVVNPGNPTGTYIPEPLLKRISDLCKKAGSWLVVDNTYEYFMYDGLKHSCIEGNHIVNVFSFSKAYGMMGWRVGYIAYPSEVENFAEQLLKVQDNIPICASILSQYLALYSLELGPQWVVDRVKSLEKNREIVLEALSPLGEGSVKGGEGAIYLWAKLPHENAYDDFDVVRWLAHKHGVAVIPGKACGCPGNLRISFGGLTENDCRAAAERLKKGLEELVRDGLSQ

SEQ ID NO: 2726 - protein, 395 aa, Phaseolus vulgaris
MSSLLKLSRRALETEMPVMVQMQEVIRGSKNAVSLAQGVVHWQPPEQALKKVKELVSDPIVSRYGNDEGIPELREALRKKLRNENNLCKSSVMVTAGANQAFVNLVLTLCDPEDSVVLFAPYYFNAYMSFQMTGVTNILVGPGSPDTLHPDADWLERILSETKPAPKLVSVVNPGNPSGTYIPEPLLKRISDLCKKAGSWLVVDNTYEYFMYDGLKHSCVEGNHIVNVFSFSKAYGMMGWRVGYIAYPSEVENFAEQLLKVQDNIPICASILSQYLALYSLELGPQWVVDRVKSLDKNKEIVLEALSPLGEGSVKGGEGAIYLWAKLPHENAYDDFDVVRWLASKHGVAVIPGIACGCPGNLRISFGGLTEKDCRAAAERLKKGLEELVRDGLRQ

SEQ ID NO: 2727 - protein, 395 aa, Cajanus cajan
MGSFLKLSKRALETDMPVMVQMQELLRGAKNAVSLAQGVVYWQPPEKALEKVKDLVTKPQVSRYGNDEGIPELRAALIDKLRDENNLHKSSVMVTAGANQAFVNLVLTLCDPGDSVVLFAPYYFNAYMSFQMTGITNILVGPGNPDTLHPDADWLERILSETKPAPKLVTVVNPGNPTGTYIPEPLLKRISDLCEKAGSWLVVDNTYEYFMYDGLKHSCIEANHIVNVFSFSKAYGMMGWRVGYIAYPSEVKEFAAQLLKVQDNIPICATILSQYVALYALEQGPQWVVGNVKSLEKNREIVLEALSPLGEGSVKGGEGAIYLWAKLPHGNAYDDFEVVRWLINKHGVAVIPGSACGSSGNLRISFGGLTENDCRAAAERLKKGLEEFVRYGLRQ

SEQ ID NO: 2728 - protein, 396 aa, Lupinus angustifolius
MGSYGNLAKRVVETEMPIMVRMQELLRGAKNAVSLAQGVVYWQPPKQALEKVKELVWEPSISRYGADEGIPELRVALAKKLRLENNLHKSSVMVTAGANQAFVNLVLTLCDAGDSVVMFAPYYFNAYMSFQMTGVTNILVGPGSPETLYPDADWLEKILSETKPVPKLVTVVNPGNPTGTYIPEPLLKRIADLCKNAGTWLVVDNTYEYFMYDGLKHSCVEGNHIINIFSFSKAYGMMGWRVGYIAYPSEVKGLATQLLKVQDNIPICASIISQYLALYSIELGPEWVQERVKTLTTNREIVIDALSPLGEGAIKGGEGAIYLYAKLPEGHGFDDFEVVQWLANRHGVAVIPGSASGSPGNLRISFGGLTESDCKAAAERLKNGLEELVRDGLVQD

SEQ ID NO: 2729 - protein, 397 aa, Cicer arietinum
MGSYANLARRAVETDMPIMVQMQELLRGAKNAVSLAQGVVYWQPPKQALDKVKELVFEPSISRYGNDEGIPELRAALVKKLRVENNLHKSSVMVTAGANQAFVNLVLTLCDAGDSVVMFAPYYFNAYMSFQMTGITNILVGPGNPETLYPDADWLEKVLSESKPVPKLVTVVNPGNPTGTYIPESLLKRIANLCEKAGSWLVVDNTYEYFMYDDLKHSCVEGNHIVNIFSFSKAYGMMGWRVGYIAYPSEVEGLATQLLKVQDNIPICASIISQYLALYSLEMGPEFVTERVKTLAKNRQIVLEALSTLGEGSIKGGEGAIYLWVKIPTGHGYNDFDVVRWLANRHGIAVIPGSACGASGNLRISFGGLTENDCRAAAERLKKGLEELVANGLVEDK

SEQ ID NO: 2730 - protein, 398 aa, Arachis hypogaea
MGSNRNLATRALETDMPVMVRMQKLLRGAKNCVSLAQGVVYWKPPEEALEKVQKLVFEPSISRYGGDDGLPELRAALIKKLRDENNLHKSSVMVTAGANQAFVNLVLTLCDAGDSVVMFAPYYFNSYMSFQMTGVTNILVGPGKPETLYPDADWLERILSETKPVPKLVTVVNPGNPSGTYIPESLLKRISDLCKNAGSWLIVDNTYEYFMYDGLKHSCVEGNHIVNVFSFSKAYGMMGWRVGYIAYPSEVEGLADQLFKVQDNIPICASIISQHLALHSLEMGPEWVTERVKTLVKNREIVLEALSPLGEGSVKGGEGAIYLWAKLPEGHGYDDFEVVHWLANRHGVAVIPGSASGSPGNLRISFGGLIESECREAAGRLKRGLEELVKHGLVKEQE

SEQ ID NO: 2731 - protein, 398 aa, Arachis hypogaea
MGSNRNLATRALETDMPVMVRMQKLLRGAKNCVSLAQGVVYWKPPEEALEKVQKLVFEPSISRYGGDDGLPELRAALIKKLRDENNLHKSSVMVTAGANQAFVNLVLTLCDAGDSVVMFAPYYFNSYMSFQMTGVTNILVGPGKPETLYPDADWLERILSETKPVPKLVTVVNPGNPSGTYIPESLLKRISDLCKTAGSWLIVDNTYEYFMYDGLKHSCVEGNHIVNVFSFSKAYGMMGWRVGYIAYPSEVEGLADQLFKVQDNIPICASIISQHLALHSLEMGPEWVTERVKTLVKNREIVLEALSPLGEGSVKGGEGAIYLWAKLPEGHGYDDFEVVRWLANRHGVAVIPGSASGSPGNLRISFGGLIESECKEAAGRLKRGLEELVKHGLVKEQE

SEQ ID NO: 2732 - protein, 394 aa, Eucalyptus grandis
MGSFGKLAKRAVETEMPVMVKIQEVIRGAKNAMSLAQGVVYWQPPKHALDKVKELVWEPSISRYGADEGIPELRAALVKKLERENKLYKSSVVVTSGANQAFVDLVLTLCDAGDTVVMFAPYYFNAYMSFQMTGVTDILVGPGDPMTLYPDADWLEKTLSETKPVPKLVTVVNPGNPSGTYIPESLLKRISDLCEQAGAWLVVDNTYEYFMYDGLKHTCIEGNHIVNIFSFSKAYGMMGWRVGYIAYPSEVEGFADQLLKVQDNIPICASIISQHLALYSLEAGPEWVTERVKTLIKNREIVVEALSPLGEGAVKGGEGAIYLWAKLPDQFVQDFDVVRWLAHKHEVVTIPGSACGCPGNLRISFGGLVESDCRAAAERLKRGLEELVRDGMVQ

SEQ ID NO: 2733 - protein, 396 aa, Trifolium pratense
MGSYGNLARRAVETEMPIMVKMQELLRGAKNAVSLAQGVVYWQPPKQALDKVKELVYEPSISRYGSDEGIPELREALVKKLRNENNLHKSSVMVTAGANQAFVNLVLTLCDAGDSVVMFAPYYFNAYMSFQMTGITNILVGPGNPETLYPDADWLEKVLSESKPVPKLVTVVNPGNPTGTYIPEPLLKRIANLCEKAGSWLVVDNTYEYFMFDDLKHTCVEGNHIVNIFSFSKAYGMMGWRVGYIAYPSEVEGLASQLLKVQDNIPICASIFSQHLALYSLELGPEWVTERVKTLEKNRQIVMEALSNLGEGSIKGGEGAIYLWVKIPSGQGYNDLDVVHWLANRHGIAVIPGSACGASGNLRISFGGLAENDCRAAAERLKKGLEELVAHGLVQD

SEQ ID NO: 2734 - protein, 399 aa, Lotus japonicus
MGSYANLARRALETEMPIMVQMQEVLRGAKNCVSLAQGVVYWQPPKPALDKVKELVWEPSVSRYGADEGLPELRAALVKKLRQENNLHKSSVMVTAGANQAFVNLVLTLCDAGDSVVMFAPYYFNAYMSFQMTGITNIHVGPGSPDTLYPDVDWLERILTESKPVPKLVTVVNPGNPTGTYIPESLLQRIANLCKNAGSWLLVDNTYEYFMFDGLKHSCVEGNHIVNIFSFSKAYGMMGWRVGYIAYPSEVEGLSAQLLKVQDNIPICASIISQHLALHSLEMGPEWVRERVQTLAKNREIVSEALSPLGEGSVKGGEGAIYLFAKLPKGGYDDFDVVRWLANRHGIAVIPGSACGAAGNLRISFGGLTESDCRAAAERLKKGLEELVANGLVQDPVNF

SEQ ID NO: 2735 - protein, 396 aa, Trifolium pratense
MGSYGNLARRAVETEMPIMVKMQELLRGAKNAVSLAQGVVYWQPPKEALDKVKELVYEPSISRYGSDEGIPELRAALVKKLRNENNLHKSSVMVTAGANQAFVNLVLTLCDAGDSVVMFAPYYFNAYMSFQMTGITNILVGPGNPETLYPDADWLEKVLSESKPVPKLVTVVNPGNPTGTYIPDSLLKRIANLCEKAGSWLVVDNTYEYFMFDDLKHTCVEGNHVVNIFSFSKAYGMMGWRVGYIAYPSEVEGLASQLLKVQDNIPICASIFSQHLALYSLELGPEWVTERVKTLEKNRQIVLEALSNLGEGSIKGGEGAIYLWVKIPSGQGYNDLDVVHWLANRHGIAVIPGSACGASGNLRISFGGLTENDCRAAAERLKKGLEELVAHGLVQD

SEQ ID NO: 2736 - protein, 393 aa, Fragaria vesca
MGSCGKLAKRAVDTDMPVMVQIQQLIRGAKNAVSLAQGVVHWQPPKQALDKVKELVWEPSISRYGADEGIPELREALVKKLRQENKLCKSSVMVTAGANQAFVNLVLTLCDAGDSVVMFAPYYFNAYMSFQMTGVTNILVGPGQPNTLYPDADWLEKTLSETKPTPKLVTVVNPGNPSGTYIPEPLLKRISDICREAGSWLVVDNTYEYFMYDGLKHSCVEGNHIVNIFSFSKAYGMMGWRVGYIAYPSEADEFGTQLLKVQDNIPICASILSQHLALYSLEMGSEWVVERVKGLVKNREIVLEALSPLGEESVKGGEGAIYLWAKLPDKVDDSEFVHWLAHRHGVVVIPGSACGCPGNVRISFGGLLEDDCKAAAGRLRKGLEELVKDGMVK

SEQ ID NO: 2737 - protein, 396 aa, Trigonella foenum-graecum
MGSYGNLARRAVETEMPIMVKMQELLRGAKNAVSLAQGVVYWQPPKQALDKVKELVYEPSISRYGNDEGIPELRAALVKKLRNENHLHKSSVMVTAGANQAFVNLVLTLCDAGDSVVMFAPYYFNAYMSFQMTGITNILVGPGNPETLYPDADWLEKVLSESKPVPKLVTIVNPGNPTGTYIPEPLLKRIANLCEKAGSWLVVDNTYEYFMFDDLKHTCIEGNHVVNIFSFSKAYGMMGWRIGYIAYPSEVEGLASQLLKVQDNIPICASIFSQHLALYSLELGPEWVTERVKTLAINRKIVLEALSNLGEGSIKGGEGAIYLWVKIPSGHGYDDFEIVRWLANRHGIAVIPGSACGASGNLRISFGGLTENDCRAAAERLKKGLEELVAHGLVQD

SEQ ID NO: 2738 - protein, 396 aa, Medicago truncatula
MGSYGNLAKRAVETEMPIMVKMQELLRGAKNAVSLAQGVVYWQPPKQALDKVKELVYEPSISRYGNDEGIPELRAALVKKLRNENNLHKSSVMVTAGANQAFVNLVLTLCDAGDSVVMYAPYYFNSYMSFQMTGITNILVGPGNPETLYPDADWLEKVLSESKPVPKLVTVVNPGNPTGTYIPESLLKRIANLCEKAGSWLVVDNTYEYFMFDDLKHTCVEGNHVVNIFSFSKAYGMMGWRIGYIAYPSEVEGLGSQLLKVQDNIPICASIISQHLALYSLELGPEWVTERVKTLAKNRQIVMEALSSLGEGSIKGGEGAIYLWVKIPSGHGYDDFEVVRWLANRHGIAVIPGSACGAAGNLRISFGGLTENDCRAAAERLKKGLEELVAHGLVQD

SEQ ID NO: 2739 - protein, 394 aa, Manihot esculenta
MGSFGKLARRALETEMPVMVQIQEVIRGAKNAMSLAQGVVYWQPPKQALEKVKELVWEPSISRYGADEGIPELREALTLKLQKENKLVKSSVMVTAGANQAFVNLVLALCDAGDSVVMFAPYYFNAYMSFQMTGVTNILVGPGNRKTLHPDADWLERTLSETRPVPKVVTVVNPGNPTGTYIPEPLLKRISDLCRKAGSWLIVDNTYEYFMYDGLKHSCVEGDHIVNIFSFSKAYGMMGWRVGYIAYPSEVEGFATQLLKIQDNIPICASLLSQHLALYSLEMGPEWVTERVKDLVRNREILLEALSPLGEDAVKGGEGAIYLWAKLPDKYLDDFRVVQWLATRHGVVVIPGGACGCAGHIRISFGGLIESDCKVAAERLRRGLEELVNHGIME

SEQ ID NO: 2740 - protein, 396 aa, Trifolium pratense
MGSFGNLAKRVVETEMPIMVKMQELLRGAKNAVSLAQGVVYWQPPKEALDKVKELVYDPSISRYGNDEGIPELRAALVKKLRDENNLHKSSVMVTAGANQAFVNLVLTLCDAGDSVVMFAPYYFNAYMSFQMTGITDIQVGPSNPETLHPDADWLEKVLSESKPVPKLVTVVNPGNPTGTYIPDSLLKRIANLCEKAGSWLVVDNTYEYFMFDDLKHTCVEGNHVVNIFSFSKAYGMMGWRVGYIAYPSEVEGLAAQLLKVQDNIPICASIISQHLALYSLELGPEWVTERVKTLAKNRQIVLEALSNVGEVSIKGGEGAIYLWLKIPSGQGYDDFEVVHWLANRHGIAVIPGSACGASGNLRISFGGLTENDCRAAAERLKKGLEELVAHGLVQD

SEQ ID NO: 2741 - protein, 394 aa, Populus trichocarpa
MGSYVKLAKRAVETEMPIMVQIQELVRGAKNAVSLAQGVVYWQPPKQALNKVKELVWEPSISRYGADEGIPELREALTQKLQKENKLVKSSVMVTAGANQAFVNLVLALCDAGDSVVMFAPYYFNAYMSFQMTGVTNILVGPGNPETLHPDADWLERTLSEAKPVPKVVTVVNPGNPSGTYIPDPLLKRISDLCREAGSWLIVDNTYEYFMYDGLKHSCIEGDHVVNIFSFSKAYGMMGWRVGYIAYPSGVEGFQTQLLKIQDNIPICASILSQHLALYSLEMGPEWVTEQVKDLVKNRDIILEALSPLGEGAVKGGEGAIYLWAKLPEQYVDDDKVVRWLATRHGVIVIPGGACGCPGHLRISFGGLTENDCKAAAERLRRGLEDLVSNGIVQ

SEQ ID NO: 2742 - protein, 394 aa, Prunus persica
MGSYGKLAKRAVETEMPIMVQIQQLVRGAKNAVSLAQGVVHWQPPKQALDKVKELVWEPSISRYGADEGILELREALVKKLHNENKLYKSSVMVTSGANQAFVNLVLTLCDSGDSVVMFAPYYFNAYMSFQMTGVTNILVGPGHPETLYPDADWLEKTLSETKPTPKLVTVVNPGNPSGTYIPDPLLKRISDICRDAGSWLVVDNTYEYFMYDDLKHTCVEGNHIVNIFSFSKAYGMMGWRVGYIAYPSEVEGFATQLLKVQDNIPICASIISQYLALHSLEMGPEWVTERVKGLVKNKEIVLEALSPLGKDAVKGGEGAIYLWAKLPDKYADDDKFVHWLAHRHGVVVIPGSACGCPGNVRISFGGLLEDDCKAAAERLRRGLEELIRDGMVQ

SEQ ID NO: 2743 - protein, 394 aa, Theobroma cacao
MGSYGMLARRIVETEMPVMVQIQELIRGAKNAMSLAQGVVYWQPPKWALDKVKDLIEEPSISRYGADEGLPELREALIRKLRQENNLRRSSVMVTAGANQAFVNLVLTLCDAGDSVVMFAPYYFNAYMSFQMTGVTKILVGPGYPKTLYPDADWLEKTLLETKPVPKLVTVVNPGNPSGTYIPEPLLKRISDLCRNAGCWLVVDNTYEYFMYDGLKHSCIEGNHIVNIFSFSKAYGMMGWRVGYIAYPTEVEGLATQLLKVQDNIPICASIISQRLALHSLEVGPEWVLERVKDLVKNREIVVEALSPLGEGAVKGGEGAIYLWATLPEKYVDDVKVVHWLANRHGVVVIPGTACGCPGHLRISFGGLMEDDCRAAAERLKRGLGELVKDGMVQ

SEQ ID NO: 2744 - protein, 396 aa, Trifolium pratense
MGSFGNLAKRVVETEMPIMVKMQELLRGAKNAVSLAQGVVYWQPPKEALDKVKELVYEPSISRYGNDEGIPELRAALVKKLRDENNLHKSSGVVTAGANQAFVNLVLTLCDAGDSVVMFAPYYFNAYMSFQMTGITDIQVGPSNPETLHQDADWLEKVLSESKPVPKLVTVVNPGNPTGTYIPDSLLKRIANLCEKAGSWLVVDNTYEYFMFDDLKHTCVEGNHVVNIFSFSKAYGMMGWRVGYIAYPSEVEGLAAQLLKVQDNIPICASIFSQHLALYSLELGPEWVTERVKTLEKNRQIVMEALSNLGEGSIKGGEGAIYLWVKIPSGQGYNDLDVAHWLANRHGIAVIPGSACGASGNLRISFGGLTENDCRAAAERLKKGLEELVAHGLVQD

SEQ ID NO: 2745 - protein, 394 aa, Malus domestica
MGSYGQLARRAVETDMPIMVQIQQLVRGAKNAVSLAQGVVHWQPPKEALDKVKELVWEPSISRYGADEGLPELREALVQKLHRENKLYKSSVMVTAGANQAFVNLALTLCDAGDSVVMFAPYYFNAYMSFQMTGVTNILVGPGHPKTLHPDADWLEKTLSETKPTPKLVTVVNPGNPSGTYIPDSLLKRISNLCRDAGSWLVVDNTYEYFMYDDLKHTCVEGNHIVNIFSFSKAYGMMGWRVGYIAYPSEVEGFGTQLLKVQDNIPICASIISQHLALHSLEMGPEWVIERVKGLVKNREIVLEALSPLGDSAVKGGEGAIYLWAKLPDKYADDDKFVHWLAHRHGVVVIPGSACGCPGNVRISFGGLVEDDCKAAAERLRRGLEELIRDGLVE

SEQ ID NO: 2746 - protein, 394 aa, Prunus mume
MGSYGKLAKRAVETEMPIMVQIQQLFRGAKNAMSLAQGVVHWQPPKQALDKVKELVWEPSISRYGFDEGILELREALVKKLHNENKLYKSSVMVTSGANQAFVNLVLTLCDSGDSVVMFAPYYFNAYMSFQMTGVTNILVGPGHPETLYPDADWLEKTLSETKPTPKLVTVVNPGNPSGTYIPDPLLKRISDICRDAGSWLVVDNTYEYFMYDDLKHTCVEGNHIVNIFSFSKAYGMMGWRVGYIAYPSEVEGFATQLLKVQDNIPICASIISQHLALHSLEMGPEWVTERVKGLVKNKNIVLEALSPLGKDAVKGGEGAIYLWAKLPDKCVDDNKFVHWLAHRHGVVVIPGSACGCPGNVRISFGGLLEDDCKAAAERLRRGLEELIRDGMVQ

SEQ ID NO: 2747 - protein, 394 aa, Castanea mollissima
MGSFGRLATRAVKTEMPVMVQVQELQRRYQNAVSLAQGVVYWLPPKQALERAKELVFEPSISRYGADEGIPELREALIKKMRLENKLNKSSVMVTAGANQAFVNLVLTLCDAGDSVVMFAPYYFNAYMSFQMTGITNILVGPGNPKTLHPDADWLERTLLETNPPPKLVTVVNPGNPTGTYIPEPLLKRISDLCRDAGAWLLVDNTYEYFMYDGLKHSCLEGNHIVNIFSFSKAYGMMGWRVGYIAYPTEVEGLADQLLKVQDNIPICASIISQRLALYSLELGPEWVTERVKDLVKNREIVLKALSPLGEDGVRGGEGAIYLWAKLPDQYVDDFKVVDWLARKHEVLVIPGSSCGCPGNLRISFGGLIESECQAAAERLRRGLEELVRDGMVG

SEQ ID NO: 2748 - protein, 393 aa, Echinacea purpurea
MGSYGMLARRAVLTETPVMVQIQELLRGVKGAISLAQGVVYWQPPKPALEKVQELVWEPSISRYGADEGLPELREALTKKLLEENNLCKSSVMVTAGANQAFVNIVLALCDAGDSVVMFAPYYFNAYMSFQMTGVTDILVGPGHPDTLHPDADWLEKTLRETKPTPKLVTVVNPGNPSGTYIPEPLLKKISDICKKAGCWLVVDNTYEYFMYDGLKHACIEGNHIVNIFSFSKAYGMMGWRVGYIAFPSEVDGFASQLLKIQDNIPICASIISQRLALHSMEVGSQWVTDQVKDLVKNRQLLVDALSPLGEGAVKGGEGAIYLWAKLPEKFIDDFAVVRWLANKHGVVLIPGSSSGCPGHVRISFGGLVENDCRLASERLKKGLEELVRDGMV

SEQ ID NO: 2749 - protein, 394 aa, Euonymus alatus
MGSYGKLARRAVETDIPIMVQIQELARGAKNAVSLAQGVVYWQPPKQALDKVKELVWEPSISCYGSDEGILPLREALTKKLEQQNKLFKSSVMVTAGANQAFVNLVLTLCDAGDSVVMFAPYYFNSYMAFQMTGVTNILVGPGHPDTLHPDADWLEKTLSETKPVPKVVSVVNPGNPSGTYIPEPLLKRISDLCKLAGSWLVVDNTYEYFMYDGRKHTCLEGSHIVNIFSFSKAFGMMGWRVGYIAYPTEVEGFAAQLLKVQDNIPICASIISQHLALHSLEMGPEWVTERVKDLVKNRDIVLEALSPLGENAVKGGEGAIYLWAKLPDKYIEDSKVVHWLATKHGVVVIPGGACGCPGHMRISFGGLREEDCKAAAERLRRGLEELVKDGMVE

SEQ ID NO: 2750 - protein, 393 aa, Flaveria ramosissima
MGSYGMLARRVVFTETPVMVQIQELLRGVKGAISLAQGVVYWQPPRPALEKVQELVWEPAISRYGADEGLPELREALTKKLREENKLCKSSVMVTAGANQAFVNIVLTLCDAGDSVVMFAPYYFNAYMSFQMTGVTNILVGPGDPNTLHPDADWLEKTLRETKPTPKLVTVVNPGNPSGTYIPEPLLKKISDICKNAGCWLVVDNTYEYFMYDGLKHSCIEGNHIVNIFSFSKAYGMMGWRVGYIAFPSEVEGFASELLKIQDNIPICASIISQRLALHSMEVGSQWVTDQVKDLVKNRQLLVDALSPLGEGAVKGGEGAIYLWAKLPEKFTDDFEVVRWLANKHGVVLIPGSPCGCPGHVRISFGGLMENDCRLASERLKKGLEELVKDGMV

SEQ ID NO: 2751 - protein, 756 aa, Glycine max
MTDYFSGSVEFGLNLSKRVYYGKGSAPSPAPAMSRSLSKSPEGYLPTAPMCYAVISDPEKVENPDIRSYQPYVLGQCEPPALIPLELHGVGMEVECSLDTAFVTVSGKWRVHCVTASSTCDCQVAIPIGEEGSLLGLEVDGSGKSYHTELISLKDEKDKDKVAKAKDGYFVKSHIYTVKIPQFRGGSVFSIKIRWSQKILFHDGQLSLCVPFSFPSYVNPAGRKISKKEKIFLKVNSGATTEVLCKTTSHPFKELLRQAGKLNLSYEAEVPAWSSTDLSFSYSVSSNDIFGAVLLQSPFLRDFDEREIFCLYLYPGNSPDRKVFKKDVVFVVDISASMKGTPLDNTKNALLTSLSQLSAQDTFNIIAFNGTVYLFSSSMERATEEAILNATTWVDTNFIANGDTNIMLPLTQAMKLLEKSTDSVPLIFLVTDGAVEDERDICNFAKSYVSSGQLVRTPRIYTFGIGLYCNHYFLQMLAQIGRGHYDSAHDLDSIDFRMQRLFSTASSVMVADITIKSLEGLDSLELFPTHIQDISFESPLILSGRYSGTFPELVKVTGTLANKTNFVVGLKVKREKDMQLSNVLSKRHIDQVTAQAWLLKSEELEEKVTKMSIQNKVPSEYTCMNMVLVQSDEGKKTPEQFLLQKAYNKLSFQKLELNNQNLFLGGLSLGFGDLKATAENLPPAIKEAKPPEGLLGRAASNCCGRLADTCCGMCLLQTCTFVNDQCTIVCTQICAALACFELIKCCVELCECDCLQ

SEQ ID NO: 2752 - protein, 752 aa, Phaseolus vulgaris
MADYFSGSVEFGLNLSKRVYYGRGSAPLSVPSMSRSPEGFLPTAPMCYAVISDPEKVDNPDIRSYQPYVLGECDPPALIPLELHGVAMEVECSLDTAFVTVTGKWRVHCVTGSSTCDCQVAIPMGEQGSLLGLEVDGSGRTYHTELISLKDEKDKDKVAKAKDGYFLKSHIYTVKIPQLRGGSVFSTKIRWSQKILFHDGQLSLCVPFSFPSYVNPAGKRISKKEKIFLKVNSGFATEVLLCKTTSHPLKELLRQAGKLNLSYEAEVSAWSSTDFNFSYSFSSNDIFGAVLLQSPFLRDFDEREIFCLYLYAGNGQGRKVFKKDVVFIVDISASMKGTPLDNTKNALLSSLSQLNAQDTFNIIAFNGALYLFSSSMESATEEAILNATKWVDTNFIANGDTNIMLPITQAMKLLEKSTDAVPLIFLVTDGAVEDEREICNFVKSYVSNGQSVPTPRICTFGIGLYCNHYFLQMLAQIGRGHYDCAHDLDSIEFRMQRLFSTASSVIVADVTIESLESLDSHELFPSHIQDISSGSPLILSGRYTGTFPELVKVTGTLADMTNFAVDLKVKREKDIQLSNVLAKRHIDMVTAQAWLLKSEEVEEKVTKMSIQNKVLSEYTCMNMVLVQSDEGKKPPEQFLLKKAYNKLSFQQLEFDMKKLFLGGLSVGFGDSKATAENLAPSIKEAKPPEGLLGKAASTCCGRLADSCCGMCLLQACTLVNDQCTIVCTQLCAALACFELIKCCIELCECDCL

SEQ ID NO: 2753 - protein, 752 aa, Cajanus cajan
MADCFSSSVEFGLNLSKRVYYGKGMAPSPATAMERSAEGFLPTAPMCYAVISDPEKVENPDIRSYQPYVLGECDPPALIPLQVLGVGMEVECSLDTAFVTVTGKWRVHCVTARSTCDCQVAIPMGEQGSLLGLEVDGSGRSYHTELISLKDEKDKDKVAKAKDGYFLNSRIYTIKIPQFRGGSVFSIKIKWSQKILFHDGQLSVCVPFSFPSYVNPVGRRISKKEKIFLKVNSGGATEMLCKTASHPFKELLRQAGKLNLLYEAEVLEWSSTDFNFSYTVTSNDIFGGLLLQSPFLRDFDEREIFCLYLYPGNSQDGKVFKKDVVFIVDISVSMKGSPLENTKNALLTSLSQLHAQDTFNIIAFNGAVSLFSSSMETATQEAILNATKWVDTNFIANGDTNIMLPLTQAMKLLEKSTDSVPLIFLVTDGAVDDEREICNFVTSYVSRGQLVRTPRICTFGIGLYCNHYFLEMLAQIGRGHYDFAHDLDAIDFRMQRLFSTASSVTVADITIEGLEGLDSYELFPTHIQDLSFGSPLILSGRYSGTFPQSVKVTGTLADMTNFVVDLKMKREKDIQLSNVLSKRHIDLVTAQAWLLKSEELEEKVSKMSIQNKVPSEYTCMSMVLVQSDEGKKAPEQFLLQKAYKKLSFQSLEMNNIQKLFLGGWSLGFGDVKATAENLAPAIKEAKPPEGLLGKAASTCCSRLADNCCGMCLLQTCNFMNDKCTIVCTQLCAALACFELIKCCIELCDCDCL

SEQ ID NO: 2754 - protein, 543 aa, Glycine max
MAEIRLTRVEQGQTKIKNVPIAVTPEGFWCCPSPVVFQKSLKTQNPLNKHKPSSPPPPKTGVQKKPVAVPVSVSVSERRTASSAPSRLVLSDEKQCSTAPERPPPTTTSVAAAERAPRQKIESLPKKVAIEFGEPGTCDMKVVLLGKQGFCVKLSVHRDVLTQKSGFFSEKLSEQSGLSCLQIADCEDVEIYVETVGLMYCKEMKQRLMKQSVSRILRILKVAEFLGFSSCIQSCLEYLEAVPWVGEEEEEKVVSTVLQLQAEGIGVNPVLKRISSDISNVPKDTLSHIIDLVLKSNEESGRREMKSIVLKLFRENNSLPSYARSTDICNDMIYRSCRSCLDSLLSLFKQAAEPDKLSEDHNPTAKCIALEADNLSWLLEILIDKQAADEFALMWANQQELAVLHAKLPTVSRYYVSCLSGRLYVGIGRGELLPSKDVRRLLLQTWLQPLMNDYNWLQHGCRSFDRKLVEEGIGRTILTLPLEDQQSILLSWLGSFLKTGDSCPNLQRAFEVWWRRTFIRPYVENQGNVAVSDSSSMLPKQRE

SEQ ID NO: 2755 - protein, 539 aa, Cajanus cajan
MAEIRLTRVEQGQTKIKNVPIAVTPEGFWCCPSPVVFQKSLKAQNPLNKPKPSSPPPKTSVQKKPVSVPVCERRASAAPAPSRLVLSDDQQCATAPERPPPTTSVAAERTPRPKIESLPKKVAIEFGEPGTCDMKVVLLGKQGFCVKLSVHRDVLTEKSCFFSEKLSEQSGLSCLQIGDCEDVEIYVETVGLMYCKEMKQRLMKQSVSRILRILKVAEFLGFSSCIQSCLEYLEAVPWVGEEEEEKVVSTVLQLQAEGIGVNPVLKRVSSDISNVPKDTHPLSHIIELVLKSNEERGRREMKSIVLKLLRENNSLPSYARSTDICNDMIYRSCRSCLDSLLSLFKQAAEPDKPSEERDPLTKCIALEADNLSWLLEILIDKQAADEFALMWANQQELAVLHAKLPTVLRYHVSCLSGRLYVGIGRGELLPSKDTRQLLLQTWLQPLMNDYNWLQHGCRSFDRKLVEEGIGRTILTLPLEDQQSILLSWLGSFLKTGDSCPNLQRAFEVWWRRTFIRPYVENQGNVAVSADSSMLPKQQE

SEQ ID NO: 2756 - protein, 536 aa, Phaseolus vulgaris
MAGIRLTRMEQGQTKIKNVPIAVTPEGFWCCPSPVVFQKSLKAQNPLNKPKPSSPPPKSSVKKKPVSVPVYERRTVTAADAPSRLVLSDDQQCATAPERPPPPTSSMAAAERGPRPKIESLPKKVAIEFGEPGTCDMKVILLGKQGFCVKLSVHRNVLTEKSSFFSEKLSEQSGLSCLQIGECEDVEIYVETVGLMYCKEMKQRLMKQSVSRILRILKVAEFLGFISCIQSCLEFLEAVPWVGEEDEEKVVSTVLQLQAEGIGVNPVLKRVSADISNVPKDTLSHIIDLVLKSNEERSRREMKSIVLKLLRENNSLPSYARTTDICNDTIYRSCRTCLDSLLELFKQAAEPSEDRDPLAKSIALEADNLTWLLEILVDKQAADEFALMWANQQELAVLHAKLPTVSRYCVSCLSGRLYVGIGRGELLPSKDTRRLLLQTWLQPLMNDYNWLQHGCRSFDRKLVEEGIGRTILTLPLEDQQSILLSWCGSFLKTGDSCPNLQRAFEVWWRRTFIRPYVENLGKVAVSDSSKFTLFAK

SEQ ID NO: 2757 - protein, 545 aa, Cicer arietinum
MGDIRLNNRVDQGQTKIKNVPIAVTPEGFWCCPSPVVFQKSLIKNQNPLNKTKPSSPPPPPPKTSVQKKAVPVAVTVTERRGSTHASSRLVISDDQQCSIDSERVSAGTSLAGERVSSRPKIETMPRKVAIEFGEPGTCDMKVVLLGKQGFSVKLSVHRDVLIEKSSFFSEKLSEQSDLSCLQVGDCEDVEIYVETVGLMYCKEMKQRLMKQNVSRILRILKVAEFLGFSSCIQSCLEYLEAVPWVGDEEEEKVVSTVLQLQGEGIGVNPVLKRVSSDISNVPKDTLSLIIELVLKSNEEKGRREMKSIVLKLLRENNSLPSYARSNDICNDMIYRSCRSCVDSLLSLFKQVAEPSFAEKPSNERDSVVKHIALEADNISWLLDILIDKQAADEFALIWANQHELASLHAKLPIVSRYHVSCISGRLYVGIGRGELLPSKETRQLLLQTWLQPLMNDYNWLQHGCRSFDRKLVEEGIGRTILTLPLEDQQSILLSWVGSFLKTGDSCPNLQRAFEVWWRRTFIRPYIENQGNVVSDCSMASKKDE

SEQ ID NO: 2758 - protein, 542 aa, Medicago truncatula
MGDVRLNRVDQGQAKIRNVPIAVTPEGFWCCPSPVVFQKSHKPQNPLNKTKPSSSPPQPQPKTSVQKKPVAVQVTERRGSAPAPSRLVISDDQQCSIGVERSLAGTSLAAERVSSRPKIETMPRKVAIEFGEPGTCDMKVVLLGKQGFSVKLSVHRDVLIEKSSFFSEKISEQSDMSCLQIGDCEDVEIYVETVGLMYCKEMKQRLMKQNVSRILRILKVAEFLGFSSCVQSCLEYLEAVPWVGDEEEEKVVSTVLQLQGEGIGVNPVLKRISSDVSNVPKDTLSHIIELVLKSNEEKGRREMKSIVLKLLRENNSLPSYARSTDSCNDMIYRSCRSCLDSLVSLFKQAAEPTFADKPSDGRDSVVKHIALEADNLSWLLDILVDKQAADEFALLWANQQELAVLHAKLPIVSRYHVSCISGKLYVGIGRGELLPLKDTRQLLLQTWLQPLMSDYNWLQHGCRSFDRKLVEEGIGRTILTLPLEDQQSILLSWVGSFLKTGDSCPNLQRAFEVWWRRTFIRPYVENQGNAVSDSSTMSKKDE

SEQ ID NO: 2759 - protein, 543 aa, Lupinus angustifolius
MAEIKVTRVGQGQTKIKNVPIAVTPEGFWCCPSPVVFQKSLKAQNPMNKPKAPCSPPTKTSVQKKPAPVPVPVSERRASAAAPTLSKLLLSDDQQCSSGPERTPARTTMAADRGPRPKIETLPRKVAIEFGEPGTCDMKVVLLGKQGFCVKLSVNRDVLTEKSSFFADKLSEQAGLSCLQIDDCEDVEIYVETVGLMYCKDMKQRLMKQSVSRILRILKVAEFLGFSSCIQPCLDYLEAVPWVGDEEEEKVVSTVLRLQAGVKVNPVLKRVSSDISNVPKDTLFQIIKLVLNSNEERGRREMKSIVLKLLRENNNSLPSQAVSSVICNDMIYGSCRSCLDSLLSLFKQAAEPAFSDKPSDDRDPIVKHIALEADNLSWLLDILIDKLAADEFALMWANQQELASLHVKLPIVSRYHVSCISGRLFVGIGRGQLLPSKDMRQLLLQTWLQPLMNDYNWLQHGCRSFDGKLVEEGIGRTILTLPLEDQQSILLSWLGSFLKTGYSCPNLQRAFEVWWRRTFIRPHVESQGNAMSDSSILLSKQHE

SEQ ID NO: 2760 - protein, 546 aa, Trifolium pratense
MGDIRLNRVDQGQTKIKNVPIAVTPEGFWCCPSPVVFQKSHKPQNPLNKTKPSSSPPQPQPKNSVQKKPVPVQVTERRGSVSASASASSRLVVSDDQQCSIGSERASAGTSLAGERVSSRPKIETMPRKVAIEFGEPGTCDMKVVLLGKQGFSVKLSVHRDVLIEKSSFFSEKFSEQSDLSSLQIGDCEDVEIYVEAVGLMYCKEMKQRLMKQNVSRILRILKVAEFLGFSSCVQSCLEYLEAVPWVGDEEEEKVVSTVLQLQGEGIGINPVLKRVSSDVSNVPKDTLSHIIELVLKSNEEKGRREMKSIVLKLLRENNSLPSYARSTDTCNDMIYRSCRSCLDSLLSLFKQAAEPTFAEKPSNERDLVVKHIALEADNLSWLLDILVDKQGADEFALLWANQQELAVLHANLPIVSRYHVSCISGRLFVCIGRGELLPSKETRQLLLQTWLQPLMNDYNWLQHGCRSFDRKLVEEGIGRTILTLPLEDQQSILLSWVGSFLKTGDSCPNLQRAFEVWWRRTFIRPYVENQGNAVSDSSTVSKKDE

SEQ ID NO: 2761 - protein, 543 aa, Trifolium pratense
MGDIRLNRVDQGQTKIKNVPIAVTPEGFWCCPSPVVFQKSHKPQNPLNKTKPSSSPPQPQPKNSVQKKPVAVQVTERRGSASVSASSRLVVSDDQQCSIGSERASAGTSLAGERVSRPKIETMPRKVAIEFGEPGTCDMKVVLLGKQGFSVKLSVHRDVLIEKSTFFSEKISKQSDLSCLQIGDCEDVEIYVEAVGLMYCKETKQRLMKQNVSRILRILKVAEFLGFSSCIQSCLEYLEAVPWIGDEEEEKVVSTVLQLQGEGIGVNPVLKRVSSEVSNVAKDTLSHIIELVLKSNEEKGRREMKSIVLKLLRENNSLPSYARSTDTCNDMMYRSCRSCLDSLLSLFKQAAEPTFAEKPSNERDLVVKHIALEADNLSWLLDILVDKQGADEFALLWANHEELAVLHAKLPIVSRYHVSCISGRLFVCIGRGELLPSKETRQLLLQTWLQPLMNDYNWLQHGCRSFDRKLVEEGIGRTILTLPLEDQQSILLSWVGSFLKTGDSCPNLQRAFEVWWRRTFIRPYVENQGNAMSDSSTLSKKDE

SEQ ID NO: 2762 - protein, 545 aa, Trifolium pratense
MGDIRLNRVDQGQTKIKNVPIAVTPEGFWCCPSPVVFQKSHKPQNPLNKTKPSSSPPQPQPKNSVQKKPVAVQVTERRGSASVSAPASSRLVVSDDQQCSIGSERASAGTSLAGERVSRPKIETMPRKVAIEFGEPGTCDMKVVLLGKQGFSVKLSVHRDVLIEKSSFFSEKISEQSDLSCLQIGDCEDVEIYVEAVGLMYCKETKQRLMKQNVSRILRILKVAEFLGFSSCIQSCLEYLEAVPWIGDEEEEKVVSTVLQLQGEGIGVNPVLKRVSSEVSNVAKDTLSHIIELVLKSNEEKGRREMKSIVLKLLRENNSLPSYARSTDTCNDMMYRSCRSCLDSLLSLFKQAAEPTFAEKPSNERDLVVKHIALEADNLSWLLDILVDKQGADEFALLWANQEELAVLHAKLPIVSRYHVSCISGRLFVCIGRGELLPSKETRQLLLQTWLQPLMNDYNWLQHGCRSFDRKLVEEGIGRTILTLPLEDQQSILLSWVGSFLKTGDSCPNLQRAFEVWWRRTFIRPYVENQGNAMSDSSTVSKKDE

SEQ ID NO: 2763 - protein, 546 aa, Trifolium pratense
MGDIRLNRVDQGQTKIKNVPIAVTPEGFWCCPSPVVFQKSHKPQNPLNKTKPSSSPPQPQPKNSVQKKPVPVQVTERRGSASVSASASSRLVVSDDQQCSIGSERASAGTSLAGERVSSRPKIETMPRKVAIEFGEPGTCDMKVVLLGKQGFSVKLSVHRDVLIEKSSFFSEKFSEQSDLSSLQIGDCEDVEIYVEAVGLMYCKEMKLRLMKQNVSRILRILKVAEFLGFSSCVQSCLEYLEAVPWVGDEEEEKVVSTVLQLQGEGIGINPVLKRVSSDVSNVPKDTLSHIIELVLKSNEEKGRREMKSIVLKLLRENNSLPSYARSTDTCNDMIYRSCRSCLDSLLSLFKQAAEPTFAEKPSNERDLVVKHIALEADNLSWLLDILVDKQGADEFALLWANQQELAVLHANLPIVSRYHVSCISGRLFVCIGRGELLPSKETRQLLLQTWLQPLMNDYNWLQHGCRSFDRKLVEEGIGRTILALPLEDQQSILLSWVGSFLKTGDSCPNLQRAFEVWWRRTFIRPYVENQGNAVSDSSTVSKKDE

SEQ ID NO: 2764 - protein, 533 aa, Cajanus cajan
MDRLSSTTILPEAFEGAKDDLTMQLALVWNQIKAPLIVPLLRLAVFLCLIMSVMMFIERVYMGIVITLVKLFGKKPEKRYKWEPMKDDIELGNSSYPMVLVQVPMYNEREVYQLSIGAACGLSWPSDRIIIQVLDDSTDPTIKELVQLECQRWASKGVNIKYEVRDNRNGYKAGALKEGMKRSYVKQCDCVAIFDADFQPEPDFLWRTVPFLVHNPELALIQARWKFVNADECLMTRMQEMSLDYHFTVEQEVGSSTYAFFGFNGTAGVWRISALNEAGGWKDRTTVEDMDLAVRASLKGWKFLYLSDLKVKNELPSTFKAYRYQQHRWSCGPANLFRKMVMEIINNKKVSLWKKIHVIYSFFFVRKVVAHINTFVFYCIVLPSTVLVPEVVVPKWGAVYIPSIITFLNAVGTPRSLHLLVFWILFENVMSLHRTKATIIGLLEASRVNEWVVTEKLGDALKAKAGGKALKKPRFRIGDRIHLLELGVAFYLFFCGCYDVMFGKNHFFIFLFIQAFAFFIMAFGYVGTIVPNS

SEQ ID NO: 2765 - protein, 533 aa, Glycine max
MDRFSSSTILPEAFQGAKDDFTMQLALVWNQIKAPLIVPLLRLAVFLCLIMSVMMFIERVYMGIVITLVKLFGRKPEKRYKWEPMKDDIELGNSCYPMVLVQVPMYNEREVYQLSIGAACGLSWPSDRIIIQVLDDSTDPTIKELVQLECQRWASKGVNIKYEVRDNRNGYKAGALKEGMKRSYVKQCDCVAIFDADFQPEPDFLWRTVPFLVHNPELALIQARWKFVNADECLMTRMQEMSLDYHFTVEQEVGSSTYAFFGFNGTAGVWRISALNEAGGWKDRTTVEDMDLAVRASLKGWKFLYLSDLKVKNELPSTFKAYRYQQHRWSCGPANLFRKMVMEIINNKKVSLWKKIHVIYSFFFVRKVVAHINTFVFYCIVLPATVLVPEVVVPKWGAVYIPSIITILNAVGTPRSLHLMVFWILFENVMSLHRTKATIIGLLEASRVNEWVVTEKLGDALKTKAGGKAPKKPRFRIGDRIHLLELGVAFYLFFCGCYDIMFGKNHFFIFLFIQSLAFLIMAFGYVGTIVPNS

SEQ ID NO: 2766 - protein, 533 aa, Glycine max
MDRFSSSTILPEAFQGAKDDFTMQLALVWNQIKAPLIVPLLRITVFLCLIMSVMMFIERVYMGIVITLVKLFGRKPEKRYKWEPMKDDIELGNSSYPMVLVQVPMYNEREVYQLSIGAACGLSWPSDRIIIQVLDDSTDPTIKELVQLECQRWASKGVNIKYEVRDNRNGYKAGALKEGMKRSYVKQCDCVAIFDADFQPEPDFLWRTVPFLVHNPELALIQARWKFVNADECLMTRMQEMSLDYHFTVEQEVGSSTYAFFGFNGTAGVWRISALNEAGGWKDRTTVEDMDLAVRASLKGWKFLYLSDLKVKNELPSTFKAYRYQQHRWSCGPANLFRKMAMEIINNKKVSLWKKIHVIYSFFFVRKVVAHINTFVFYCIVLPATVLVPEVVVPKWGAVYIPSIITILNAVGTPRSLHLMVFWILFENVMSLHRTKATIIGLLEASRVNEWVVTEKLGDALKAKAGGKAPKKPRFRIGDRIHLLELGVAFYLFFCGCYDVMFGKNHFFIFLFIQSFAFLIMAFGYVGTIVPNS

SEQ ID NO: 2767 - protein, 533 aa, Lotus japonicus
MERISSTTTLPYAFQGARDDITMQLSLIWSQIKAPLVVPLLRLAVFFCLILSVMMFIERVYMGVVITLIKVFGRKPEKRYKWEPMKDDIELGNSSYPMVLVQIPMYNEREVYQLSIGAGCGLSWPSDRIIIQVLDDSTDPTIKELVQLECQRWASKGVNIKYEVRDNRNGYKAGALKEGMKHSYVKQCDFVAIFDADFQPEPDFLWRTVPFLVHNPQLALIQARWKFVNSDECLMTRMQEMSLDYHFTVEQEVGSSTYAFFGFNGTAGIWRISALNEAGGWKDRTTVEDMDLAVRASLKGWKFLYLSDLKVKNELPSTLKAYRYQQHRWSCGPANLFKKMVLEIVRNKKVSLWKKIHVIYSFFFVRKVVAHINTFVFYCIILPATVLVPEVVVPKWGAVYIPSVITILNAVGTPRSLHLMVFWILFENVMSLHRTKATIIGLLEASRVNEWIVTEKLGDALKAKAGGKAPKKPRFRVGDRVHMLELGVGFYLFFCGCYDVMFGKNHYFIYLFIQAFAFFIMAFGYVGTFVPNS

SEQ ID NO: 2768 - protein, 531 aa, Medicago truncatula
MDRFSSTTIPFALQGAKDDLTMQISLIWSQIKAPLIVPLLRISVFLCLIMSVMMFIERVYMGVVITLVKLFGRKPEKRYKWEPIKDDIELGNSCYPMVLVQIPMYNEREVYQLSIGAACGLSWPSDRIIIQVLDDSTDPTIKELVQLECQRWASKGVNIKYEVRDNRNGYKAGALKEGMKHSYVKQCDHVAIFDADFQPEPDFLWRTVPFMVHNPEIGLIQARWKFVNSDECMMTRMQEMSLDYHFTVEQEVGSSTYAFFGFNGTAGVWRISALNEAGGWKDRTTVEDMDLAVRASLKGWKFLYLSNLKVKNELPSTFKAYRYQQHRWSCGPANLFRKMVLEIIRNKKVSLWKKIHVIYSFFFVRKVIAHINTFVFYCIVLPATVLVPEVAVPKWGAVYIPSVITLLNAVGTPRSLHLLVFWILFENVMSLHRAKATVIGLLEASRVNEWIVTEKLGDALKAKAGTKALKKPRFRIEDRIHLLELGVGMYLFFIGCYDVMFGKNHFFIFLFIQAIAFFIMAFGYVGTFVPN

SEQ ID NO: 2769 - protein, 526 aa, Arachis hypogaea
MDGVSFEGAKDDITMQFAMVWSQIKAPLIVPMLRIAVFLCLIMSVMMFIERVYMGIVISLVKLFGRRPEKRYKWEPMKDDVELGNSSYPMVLVQIPMYNEREVYQLSIGAACGLSWPSDRIVVQVLDDSTDQAIKELVQIECQRWASKGVNIKYEVRDNRNGYKAGALKEGMKRSYVKQCDYVAIFDADFQPEPDFLWRTIPFLVHNPELALIQARWKFVNSDECLMTRMQEMSLDYHFTVEQEVGSSSYAFFGFNGTAGVWRIAALNEAGGWKDRTTVEDMDLAVRASLKGWKFCYLSDLKVKNELPSTLKAYRYQQHRWSCGPANLFRKMVLEIIRNKKVSTWKKVHVIYSFFFVRKVIAHINTFVFYCIVLPATVVVPEVVVPKWGAVYIPSVITLLNAVGTPRSLHLLVFWILFENVMSLHRTKATIIGLLEASRVNEWVVTEKLGDALKSKAGGKVASKKPRFKIGDRFHLLELGVGFYLFFCGCYDVMFGKNHYFIFLFIQAIAFFIMAFGYVGTFVPTS

SEQ ID NO: 2770 - protein, 534 aa, Lupinus angustifolius
MDQLSSTTTILPEAFQGAKDDITMQLSLIWSQIKAPLIVPLLRISVVLCLCMSVMMLIERVYMGIVISLVKLFGRKPEKRYKWEPMKDDVELGNSSYPMVLVQVPMYNEREVYQLSIGAACGLSWPSDRIIIQILDDSTDPTIKELVQLECQRWASKGVNIKYEVRDNRNGYKAGALKEGMKRSYVKQCDYVAIFDADFQPEPDYLWRTIPFLVHNNELALIQARWKFVNSDECLMTRMQEMSLDYHFTVEQEVGSSTYAFFGFNGTAGVWRIAALNEAGGWKDRTTVEDMDLAVRASLKGWKFLYLSDLKVKNELPSTFKAYRYQQHRWSCGPANLFRKMVMEIIRNKKVTLWKKIHVIYSFFFVRKVVAHITTFVFYCIILPATVVVPEVVVPKWGAVYIPSIITLLNAVGTPRSLHLLVFWILFENVMSLHRTKATIIGLLEASRVNEWIVTEKLGDALKGKAGVKAPKKPRFRIGDRIHLLEIGVGFYLFFIGVYDVMFGKNHFFIYLFIQAFAFFIMGFGYVGTFVPSS

SEQ ID NO: 2771 - protein, 533 aa, Cicer arietinum
MDHLSSITTIPDAFQGAKDDITMQFLLIWSQIKAPLIVPLLRLAVFLCLIMSVMMFIERVYMGIVITLVKLFGKKPEKRYKWEPIKDDIELGNSCYPMVLVQIPMYNEREVYQLSIGAACGLSWPSDRIIVQVLDDSTDPTIKELVQLECQRWASKGVNIKYEVRDNRNGYKAGALKEGMKHSYVKQCDLVAIFDADFQPEPDFLWRSVPFLVHNPELGLIQARWKFVNADECMMTRMQEMSLDYHFTVEQEVGSSTYAFFGFNGTAGVWRIAALNEAGGWKDRTTVEDMDLAVRASLKGWKFLYLSNLKVKNELPSTFKAYRYQQHRWSCGPANLFRKMVMEIIRNKKVSLWKKIHVIYSFFFVRKVIAHINTFVFYCIVLPATVLVPEVSVPKWGAVYIPSLITLLNAVGTPRSLHLLVFWIMFENVMSLHRAKATIIGLLEASRVNEWIVTEKLGDAVKTKVRTKALKKPRFKIQDRIHLLELGVGMYLVICGCYDVMFGKNHFYIFLFIQAMAFFIMAFGYVGTFVPNS

SEQ ID NO: 2772 - protein, 535 aa, Trifolium pratense
MDHFSSTTTSTIPFALQGAKDDITMQISLIWSQIKAPLIVPLLRISVFLCLIMSVMMFIERVYMGVVITLVKLFGRKPEKRYKWEPIKDDIELGNSCYPMVVVQIPMYNEREVYQLSIGAACGLSWPSDRIIIQVLDDSTDPTIKELVQLECQRWASKGVNIKYEVRDNRNGYKAGALKEGMKHSYVKQCDFVAIFDADFQPEPDFLWRTVPFMVHNSELGLIQARWKFVNADECMMTRMQEMSLDYHFTVEQEVGSSTYAFFGFNGTAGVWRIAALNEAGGWKDRTTVEDMDLAVRASLKGWKFLYLSNLKVKNELPSTFKAYRYQQHRWSCGPANLFRKMVMEIIRNKKVTLWKKIHVIYSFFFVRKVIAHINTFVFYCIVLPATVLVPEVAVPKWGAVYIPSVITLLNAVGTPRSLHLLVFWILFENVMSLHRAKATVVGLLETSRVNEWVVTEKLGDALKVKAGTKALKKPRFRIEDRIHLLELGVGMYLFFIGWYDVMFGKNHYFIFLFIQAFAFFIMAFGYIGTFVPNS

SEQ ID NO: 2773 - protein, 535 aa, Trifolium pratense
MDHFSSTTTSTIPFALQGAKDDITMQISLIWSQIKAPLIVPLLRISVFLCLIMSVMMVIERVYMGVVISLVKLFGRKPEKRYKWEPIKDDIELGNSCYPMVVVQIPMYNEREVYQLSIGAACGLSWPSDRIIIQVLDDSTDPTIKELVQLECQRWASKGVNIKYEVRDNRNGYKAGALKEGMKHSYVKQCDYVAIFDADFQPEPNFLWRTVPFMVHNPELGLIQARWKFVNADECMMTRMQEMSLDYHFTVEQEVGSSTYAFFGFNGTAGVWRIAALNEAGGWKDRTTVEDMDLAVRASLKGWKFLYLSNLKVKNELPSTFKAYRYQQHRWSCGPANLFRKMVMEIIRNKKVSLWKKIHVIYSFFFVRKVIAHINTFVFYCIVLPATVLVPEVAVPKWGAVYIPSVITLLNAVGTPRSLHLLVFWILFENVMSLHRAKATVVGLLETSRVNEWVVTEKLGDALKVKAGTKALKKPRFRIEDRIHLLELGVGMYLFFIGWYDVMFGKNHYFIFLFIQAFAFFIMAFGYIGTFVPNS

SEQ ID NO: 2774 - protein, 533 aa, Trifolium pratense
MDHFSSTTTIPFALQGAKDDITMQFSLIWSQIKAPLIVPLLRISVFLCLIMSVMMVIERVYMGVVISLVKLFGRKPEKRYKWEPIKDDIEFGNSCYPMVVVQIPMYNEREVYQLSIGAACGLSWPSDRIIIQVLDDSTDPTIKELVQIECQRWASKGVNIKYEVRDNRNGYKAGALKEGMKHSYVKQCDYVAIFDADFQPEPNFLWRTVPFMVHNPELGLIQARWKFVNADECMMTRMQEMSLDYHFTVEQEVGSSTYAFFGFNGTAGVWRIAALNEAGGWKDRTTVEDMDLAVRASLKGWKFLYLSNLKVKNELPSTFKAYRYQQHRWSCGPANLFRKMVMEIIRNKKVSLWKKIHVIYSFFFVRKVIAHINTFVFYCIVLPATVLVPEVAVPKWGAVYIPSVITLLNAVGTPRSLHLLVFWILFENVMSLHRAKATIVGLLETSRVNEWIVTEKLGDALKVKAGTKALKKPRFRIEDRIHLLELGVGMYLFFIGCYDVMFGKNQFFIFLFIQAFAFFIMAFGYIGTFVPNS

SEQ ID NO: 2775 - protein, 533 aa, Lupinus angustifolius
MDQLSSTNILPETFQGAKDDIFMQFALVWSQIKAPLIVPLLRIGVVLCLFMSVMMLMERLYMGIVIILVKLFGRKPEKRYKWEPMKDDMELGNSSYPMVIVQVPMYNEREVYQLSIGAACGLSWPSDRIIIQVLDDSTDPIIKELVQLECQRWASKGVNIKYEVRDNRNGYKAGALKEGMKRSYVKQCDYVAIFDADFQPEPDFLWRTIPFLVHNSELALIQARWKFVNSNECLMTRMQEMSLDYHFTVEQEVGSSTYAFFGFNGTAGVWRIAALNEAGGWKDRTTVEDMDLAVRASLKGWKFLYLSDLKVKNELPSTFKAYRYQQHRWSCGPANLFRKMAMEIIRNKKVTLWKKIYVIYSFFFVRKVVAHINTFVFYCIILPATVVVSEVEVPKWGAVYIPSIITLLNAVGTPRSLHLLVFWILFENVMSLHRTKATIIGLLEASRVNEWIVTEKLGDALKGKAGTKAPKKPRFRIGDRIHLLELGVGFYLFFIGVYDVLFGKNHFFIYLFVQAFAFFIMGFGYVGTFVPNS

SEQ ID NO: 2776 - protein, 533 aa, Theobroma cacao
MDRLSSTTILPDTFQGTRDDFSMQMAVIWGQIKAPLIVPLLRLTVIVCLIMSLMLFIERVYMGIVIMLVKLFGRKPERRYKWEPIKDDVELGNSAYPMVLVQIPMYNEREVYQLSIGAACGLSWPSDRIIIQVLDDSTDPTIKDLVELECQRWASKGINIKYEIRDNRNGYKAGALKEGMKRSYVKHCDYVVIFDADFQPEPDFLWRTIPFLVHNPELALVQARWKFVNADECLMTRMQEMSLDYHFTVEQEVGSSTYAFFGFNGTAGVWRIAALNEAGGWKDRTTVEDMDLAVRASLKGWKFLYLGSLKVKNELPSTLKAYRYQQHRWSCGPANLFRKMVMEIITNKKVSSWKKVHVIYSFFVVRKLVAHIVTFIFYCVVLPATVLVPEVEVPKWGAVYIPTIITILNAVGTPRSLHLLVFWILFENVMSLHRTKATFIGLLEAGRVNEWIVTEKLGDALKAKAGTKAPRKPRFRFGERLHLLELCVGAYLFFCGCYDVVFGKNHYFIYLFAQAIAFFIMGFGYVGTIVPNS

SEQ ID NO: 2777 - protein, 523 aa, Cajanus cajan
MEAFQGARDDISFQIGLIWSQVKEPVIVPLLRVSVFLCLAMSLMMLVERVYMGFVICLVKLFGRKPEKRYKWEPMKDDVELGNSIYPMVLVQVPMYNEREVYQLSIGAACGLSWPSDRIIIQILDDSTDPTIKELVQMECSRWASKGVNIKYEVRDNRNGYKAGALKEGMKRSYVKQCDYVAIFDADFQPETDFLWRTVPFLVNNPELGLVQARWKFVNANECLMTRMQEMSLDYHFTVEQEVGSSTYAFFGFNGTAGVWRISALNEAGGWKDRTTVEDMDLAVRASLKGWKFLYLANLKVKNELPSTLKAYRYQQHRWSCGPANLFKKMFTEIMRNKKVSLWKKIYVIYSFFFVRKVVAHINTFVFYCIVLPATVVVPEVAVPKWGAVYIPSIITLLNAVGTPRSLHLLVFWILFENTMSLHRTKATIIGLLEASRVNEWIVTEKLGDALKGKGGGKAPKKFRFKIGERIHMLELLVGFYLFFCGCYDIMFGKNRFYIFLYIQSIAFFIMAFGYVGTFVPNS

SEQ ID NO: 2778 - protein, 523 aa, Phaseolus vulgaris
MEAFEGARDDISSQVGLIWSQVKEPVMVPLLRVAVFVCLGMSIMMLVERVYMGFVICLVKLFGRRPEKRYKWESLKEDVELGNSSYPMVLVQVPMYNEREVYQLSIGAACGLSWPSDRIIVQILDDSTDPSIKELVQMECSRWASKGVNIKYEVRDNRNGYKAGALKEGMKRSYVKQCDYVAIFDADFQPEPDFLWRTVPFLVNNPELGLVQARWKFVNANECLMTRMQEMSLDYHFTVEQEVGSSTYAFFGFNGTAGVWRISALNEAGGWKDRTTVEDMDLAVRASLKGWKFLYLANLKVKNELPSTLKAYRYQQHRWSCGPANLFRKMVMEIIRNKKVSLWKKIYVVYSFFFVRKVVAHLNTFVFYCIVLPATVVVPEVAVPKWGAVYIPSIITLLNAVGTPRSLHLLVFWILFENTMSLHRTKATIIGLLEASRVNEWIVTEKLGDALKGKGGGKAAKKIRFRIGDRIHMLELLVGFYLFFCGCYDVMFGKNRFYIFLYIQSIAFFIMAFGYVGTIVPNS

SEQ ID NO: 2779 - protein, 529 aa, Gossypium raimondii
MDRFPSTTIFPDTTDDLSMQMAVIWGQIKAPLIVPLLKLAVVVCLIMSVMLFIERVYMGIVIALVKLFGRKPDKRFKWEAIKDDVELGNSAYPMVLVQIPMYNEREVYQLSIGAACGLSWPSDRIVIQVLDDSTDPTIKDMVELECQRWASKGINIKYEIRDNRNGYKAGALKEGMKHSYVKHCDYVVIFDADFQPEPDFLWRTIPFLVHNPELALVQARWKFVNADECLMTRMQEMSLDYHFTVEQEVGSSTYSFFGFNGTAGVWRISALNEAGGWKDRTTVEDMDLAVRASLKGWKFLYLGSLKVKNELPSTLKAYRYQQHRWSCGPANLFRKMVMEIIKNKKVSTWKKVHVIYSFFVVRKLVAHIVTFIFYCVVLPATVLVPEVEVPKWGAVYIPSIITILNAVGTPRSFHLLVFWILFENVMSLHRTKATFIGLLEAGRVNEWIVTEKLGDAHKSKAAAKAPRKPRFRFGERLHVLELSVGAYLFFCGCYDVVFGKNHYFIYLFAQAIAFFIMGFGYVGTIIPNS

SEQ ID NO: 2780 - protein, 529 aa, Gossypium hirsutum
MDQFPSTTIFPDTTDDLSMQMAVIWGQIKAPLIVPLLKLAVVVCLIMSVMLFIERVYMGIVIALVKLFGRKPDKRFKWEAIKDDVELGNSAYPMVLVQIPMYNEREVYQLSIGAACGLSWPSDRIVIQVLDDSTDPTIKDMVELECQRWASKGINIKYEIRDNRNGYKAGALKEGMKHSYVKHCDYVVIFDADFQPEPDFLWRTIPFLVHNPELALVQARWKFVNADECLMTRMQEMSLDYHFTVEQEVGSSTYSFFGFNGTAGVWRISALNEAGGWKDRTTVEDMDLAVRASLKGWKFLYLGSLKVKNELPSTLKAYRYQQHRWSCGPANLFRKMVMEIIKNKKVSTWKKVHVIYSFFVVRKLVAHIVTFIFYCVILPATVLVPEVEVPKWGAVYIPSIITILNAVGTPRSFHLLVFWILFENVMSLHRTKATFIGLLEAGRVNEWIVTEKLGDAHKSKAAAKAPRKPRFRFEERLHVLELSVGAYLFFCGCYDVVFGKNHYFIYLFAQAIAFFIMGFGYVGTIVPNS

SEQ ID NO: 2781 - protein, 539 aa, Fagus grandifolia
MDRLTSTTLLPESFQGARDDISMQLGIIWAQIKAPLIVPLLRISVVLCLIMSLMLFIERVYMGIVITLVKLFGRKPDKRYKWEAMKDDVELGNSAYPMVLVQIPMYNEREVYQLSIGAACGLSWPSDRIIIQILDDSTDPTIKDLVELECQRWASKGINIKYEIRDNRNGYKAGALKEGMKRSYVKQCDYVAIFDADFQPEPDFLWRTIPFLVHNPQIALVQTRWKFVNSDECLMTRMQEMSLDYHFTVEQEVGSSTYAFFGFNGTAGVWRIAALNEAGGWKDRTTVEDMDLAVRASLKGWKFLYLGSLQVKNELPSTLKAYRYQQHRWSCGPANLFRKMAMEIIRNKKVTLWKKIHVIYSFFFVRKIIAHINTFVFYCIVLPATVIVPEVAVPKWGAVYIPSLITLLNAVGTPRSFHLLVFWILFENVMSLHRTKATIIGLLEATRANEWIVTEKLGDALKAKGGSKAPRKPRFRIGERLLLLELGVGAYLFFCGCYDAFFGKNHYFIFLYIQAIAFFIVGFGYVGYFCTKLLEELQQ

SEQ ID NO: 2782 - protein, 532 aa, Manihot esculenta
MDRFTTTAIIPDAFQGARADISMQFSIIWDQIKAPLIVPLLRLAVAICLIMSLMLFIERLYMGIVIILVKIFGRKPERRYKWEPIRDDVELGNSAYPMVLIQIPMYNEREVYQLSIGAACGLSWPSDRIIIQVLDDSTDPVIKDLVELECQRWASKGINIKYEIRDNRNGYKAGALKEGMKRNYVKSCDYVAIFDADFQPEPDFLWRTIPFLFHNPELALVQSRWKFVNSDECLMTRMQEMSLDYHFTVEQEVGSSTYAFFGFNGTAGVWRIGALNEAGGWKDRTTVEDMDLAVRASLKGWKFLYLGTLKVKNELPSTFKAYRYQQHRWSCGPANLFRKMLMEIIRNKKVTLWKKVHVIYSFFLVRKIVAHIVTFIFYCVVLPATVLVPEVEVPKWGAVYIPSIITILNAVGTPRSLHLMVFWILFENVMSLHRTKATFIGLLEAGRVNEWIVTEKLGDALKTKAVKAPKKPRFKFGERLHLLELGAGAYLFFCGCYDAAFGKNHYFLYLYVQAIAFFIMGFGYVGTFVPQS

SEQ ID NO: 2783 - protein, 532 aa, Populus trichocarpa
MERLTSTQMIPDAFQGARDDVTMQFAMIWGQIKAPLIVPLLRLAVAICLIMSLMLFIERVYMGIVIVLVKLFGRKPDRRYKWEPMKDDVEAGNSTYPMVLVQIPMYNEREVYQLSIGAACGLSWPSDRIIIQVLDDSTDPTIKDMVELECQRWASKGINIKYEIRDSRNGYKSGALKEGMKRSYVKSCDYVAIFDADFQPEPDFLRRTIPFLVHNPELGLVQTRWKFVNADECLMTRMQEMSLDYHFTVEQEVGSSTYAFFGFNGTAGVWRIAALNEAGGWKDRTTVEDMDLAVRASLKGWEFLYLSSVKVKNELPSTLKAYRYQQHRWSCGPANLFRKMFMEIITNKKVTSWKKVHVIYSFFFVRKIVAHLVTFIFYCVVLPATVLVPEVEVPKWGAVYIPSIITILNAVGTPRSLHLLVFWILFENVMSLHRTKATFIGLLEAGRVNEWIVTEKLGDALKSKANKAAKKPRFRFGERLHLLELGTGAYLFFCGCYDVVFGKNHYFIYLYAQAIAFFIVGLGCVGTIVPRS

SEQ ID NO: 2784 - protein, 533 aa, Aristolochia fimbriata
MDRISSGALLPDTFQGSRDDVTEQIGLIWQQIKAPLIVPLLRIVLFLCLAMSLMLFVERVYMGVVIVLVKLFGRKPEKRYKWEPIRDDVELGNSAYPMVLVQIPMYNEKEVYQLSIGAACGLSWPSDRIIIQVLDDSTDPTVKDLVELECQRWASKGINIKYEIRDNRNGYKAGALKEGMKHSYVKQCDYVVIFDADFQPEPDFLWRSVPFLVHNPEVGLVQARWKFVNSNECLMTRMQEMSLDYHFTVEQEVGSSTYAFFGFNGTAGVWRISALNEAGGWKDRTTVEDMDLAVRASLKGWKFVYLGDLKVKNELPSTFKAYRYQQHRWSCGPANLFRKMVKEIIRNKRVSLLKKVYVIYSFFFVRKVIAHIVTFVFYCVVMPASVLVPEVDIPKWGAVYIPSVITILNAVGTPRSIHLLVFWILFENVMSLHRTKATMIGLLEAGRVNEWVVTEKLGDALKTKPVMKAAKKPRIKIGDKLHLLELGVGAWLFFCGCYDLAFGKNHYFIYLYLQAIAFFVMGFGYVGTFVPHS

SEQ ID NO: 2785 - protein, 533 aa, Cocos nucifera
MERVSSTAILPEAFQGARDDIMEQMGLVWQQIKAPVIVPLLRLAVFLCLTMSLMLFVERVYMAVVIFIVKLLGKRPEKRYKWEPMRDDLELGNSAYPMVLVQIPMYNEKEVYQLSIGAACGLSWPSDRIIIQVLDDSTDPVIKDLVVLECQRWASKGINIKYEIRDNRKGYKAGALKEGMKHGYVKDCDYVAIFDADFQPEPDFLWRTIPFLVRNPELALVQARWKFVNSDECLMTRMQEMSLDYHFTVEQEVGSSTYAFFGFNGTAGVWRISAINEAGGWKDRTTVEDMDLAVRASLKGWKFVFLGDLKVKNELPSTLKAYRYQQHRWSCGPANLFRKMLLEIARNKKVSLFKKVHVIYNFFFVRKIVAHIVTFVFYCMVIPATVLVPEVEIPTWGAVYIPSVITLLNAVGTPRSLHLLVFWILFENVMSLHRTKATFIGLLEAGRVNEWVVTEKLGDALKTKVAANAARKPRIRIGDRLHLLELGVGAYLFFCGCYDVAFGKNHYFIFLFLQAIAFFIVGLGYVGTFVPHS

SEQ ID NO: 2786 - protein, 533 aa, Eucalyptus grandis
MDRLSATGLLPDTFGGARDDISMQLSLIWAQIKAPLLVPLLRLAVFLCLAMSLMLFLERVYMAVVILLVKLFGRKPEKRYRWEPMKDDVELGNSAYPMVLVQIPMYNEREVYQLSIGAACGLSWPSDRIIIQVLDDSTDPTIKDLVELECQRWASKGINIRYEIRDNRNGYKAGALKEGMKRSYVKQCDYVAILDADFQPEPDFLWRTIPFLVHNPEVALVQARWKFVNADECLMTRMQEMSLDYHFTVEQEVGSSTHAFFGFNGTAGVWRISALNEAGGWKDRTTVEDMDLAVRASLKGWKFVYLGSLKVKNELPSTFKAYRFQQHRWSCGPANLFRKMAMEIIRNKKVTLWKKVHVIYSFFLVRKIVAHIVTFIFYCVVLPATVFVPEVTVPKWGAVYIPSIITVLNAVGTPRSLHLVVFWILFENVMSFHRTKATFIGLLEAGRVNEWIVTEKLGDALKVKASNKVPKKPKFRFGDRLHVLELGVGAYLFFCGCYDIAFGRNHYFMYLFAQAIAFFIMGFGYIGTFVPNS

SEQ ID NO: 2787 - protein, 523 aa, Medicago truncatula
MYAFQGARNGLGLQHEFLWRQIREPLIVPLLRVAVFVCLGMSLMMLVERVYMGIVISYVKLFGRKPEKRYKWETIKDDVELGNSNYPMVLVQVPMYNEREVYQLSIGAACGLSWPSDRIIIQILDDSTDPTIKELVQVECRRWRSKGVNIKYEVRDNRNGYKAGALKEGMKHSYVKQCDYVAIFDADFQPEPDFLWRTIPFLVNNPDIGLVQARWKFVNADECLMTRMQEMSLNYHFTVEQEVGSSSYAFFGFNGTAGVWRISALNEAGGWKDRTTVEDMDLAVRASLKGWKFLYLSDLQVKNELPSTLKAFRYQQHRWSCGPANLFRKMVMEIVTNKKVSLWKKIYVVYSFFFVRKIVAHINTFVFYCIVLPATVMVPEVVVPKWGAVYIPSIITLLNAVGTPRSFHLLVFWILFENTMSLHRTKATIIGLLEASRVNEWIVTEKLGDAFKGKASGKGLKKLRFRIGDRIHMLELVVGFYLLLCGCYDLMYGKNHFFIFLYIQAFAFFIMAFGYVGTFVPNS

SEQ ID NO: 2788 - protein, 533 aa, Cocos nucifera
METVSSTALLPEAFQGARDDIMEQMGLVWQQIKAPVIVPLLRLAVFLCLTMSLMLFVERVYMAVVIFIVKLLGKRPEKRYKWEPMRDDLELGNSAYPMVLVQIPMYNEKEVYQLSIGAACGLSWPSDRIIIQVLDDSTDPVIKDLVVLECQRWASKGINIKYEIRDNRKGYKAGALKEGMKHGYVKDCDYVAIFDADFQPEPDFLFRTIPFLVHNPELALVQARWKFVNSDECLMTRMQEMSLDYHFTVEQEVGSSTYAFFGFNGTAGVWRISAINEAGGWKDRTTVEDMDLAVRASLKGWKFVFLGDLKVKNELPSTLKAYRYQQHRWSCGPANLFRKMLLEIARNKKVSLFKKVHVIYNFFFVRKIVAHIVTFVFYCMVIPATVLVPEVEIPTWGAVYIPSVITLLNAVGTPRSLHLLVFWILFENVMSLHRTKATFIGLLEAGRVNEWVVTEKLGDALKTKVAANAARKPRIRIGDRLHLLELGVGAYLFFCGCYDVAFGKNHYFIFLFLQAIAFFIVGLGYVGTFVPHS

SEQ ID NO: 2789 - protein, 526 aa, Nicotiana benthamiana
MDRFSSTTLLPDDLTVQLTIIWEQIKAPLIVPLLRIAVFLCLLMSLMLFIERVYMGIVIILVKFFGKKPEKRYKWESLKDDVELGNSSYPMVLVQIPMYNEKEVYQLSIGAACGLSWPSDRIIVQVLDDSTDPIIRNLVSMECQRWASKGINIKYEIRDNRNGYKAGALKEGLKHQYVKQCDYVAIFDADFQPEPDFLWRTIPFLVYNPELGLVQARWKYVNADECLMTRMQEMSLDYHFTVEQEVGSSTYAFFGFNGTAGVWRIAAIDEAGGWKDRTTVEDMDLAVRASLKGWKFLYLSSLKVKNELPSTFKAYRYQQHRWSCGPANLFRKMFAEIIRNRKVSLWKKIHVIYSFFFVRKVVAHIVTFVFYCIVLPATVLVPEVEVPKWGAVYIPSIITLLNAVGTPRSFHLIIFWILFENVMSLHRTKATFIGLLEAGRVNEWIVTEKLGDAFKIKSAVKAFKKPRFRFGDRLHLLELATGAYLFFCGCYDIAFGKNHYFLYLFIQAFAFFIMGFGHVGTFVPNS

SEQ ID NO: 2790 - protein, 533 aa, Solanum lycopersicum
MDRFSSTTLFPDTLAGTRDDLTEQWTIIWEQIKAPLIVPLLRIAVFLCLLMSILLFIERVYMGIVITLVKMFGRKPDKRYKWESLKDDVEIGNSCYPMVLVQIPMYNEKEVYQLSIGAACGLSWPSDRIIIQVLDDSTDPIIKNLVSMECQRWASKGIDIKYEIRDNRNGYKAGALKEGLKHPYVKQCDYVAIFDADFQPEPDFLWRTIPFLVHNPQLGLVQARWKFVNADECLMTRMQEMSLDYHFTVEQEVGSSTYAFFGFNGTAGVWRIAALEEAGGWKDRTTVEDMDLAVRASLKGWKFLYLSALKVKNELPSTFKAYRYQQHRWSCGPANLFRKMFMEIIRNKKVSLWKKIHVIYSFFFVRKVVAHIVTFVFYCVVLPATVLVPEVEVPKWGAVYIPSIITILNAVGTPRSLHLIIFWILFENVMSLHRTKATFIGLLEAGRVNEWIVTEKLGDVLKMKSAIKAVKKPRFRFGDRLLLLELATGAYLFFCGCYDVAFGKNHYFLYLFLQAFAFFIIGFGHIGTFVPNS

SEQ ID NO: 2791 - protein, 534 aa, Tripterygium wilfordii
MERLSSTNLLPETFQGARDDLSMQLSIIWGQIKAPLIVPLLRVAVAICLAMSLMLFVERVYMGIVIVLIKIFGRKPEKKYKWEPIKDDIEIGNSAYPMVLVQIPMYNEREVYQLSIGAACGLSWPSDRIIIQVLDDSTDPTIKDLVELECQRWASKGINIKYEVRDNRNGYKAGALKEGMKRSYVKNCDFVAILDADFQPEPDFLWRTIPFLVHNPQLGLVQARWKFVNSDECLMTRMQEMSLDYHFTVEQEVGSSTHAFFGFNGTAGVWRISALNEAGGWKDRTTVEDMDLAVRASLKGWKFLYLGALKVKNELPSTFKAYRYQQHRWSCGPANLFRKMVMEIILNKKVTLWKKIHVIYSFFLVRKIIAHLVTFFFYCIVLPATVLVPEVEVPKWGSVYIPSIITILNAVGTPRSLHLMVFWILFENVMSLHRSKATLVGLLEAARVNEWIVTEKLGDALKSKAATKAPKKPRFRFGERLHMLELGVGAYLFFIGCYDVVFGKNHYYFYLYVQAFAFFIMGFGYVGTFVPNSH

SEQ ID NO: 2792 - protein, 523 aa, Cicer arietinum
MVEFQGASDEVSLQLEFIWRQVREPLIVPILRVAVFLCLTMSLMMLVERVYMGIVICLVKLFDRKPEKQYKWESFKDDVELGNSNYPMVLVQVPMYNEREVYQLSIGAACGLSWPSDRIIIQILDDSTDPTIKELVELECHKWRSKGVNIKYEVRDNRNGYKAGALKEGMKHSYVKQCDYVAIFDADFQPEPDFLWRTIPFFVNNPEIGLVQARWKFVNADECLMTRMQEMSLDYHFRVEQEVGSSTYAFFGFNGTAGVWRTLALNEAGGWKDRTTVEDMDLAVRASLKGWKFLYLSNLKVKNELPSTLKAYRYQQHRWSCGPANLFRKMFREIVTNKKVSFWKKIYVVYSFFFVRKIVAHINTFVFYCIVLPATVVVPEVVVPKWGAVYIPSIITLLNAVGTPRSLHLLLFWILFENTMSLHRTKATIIGLLEASRVNEWVVTEKLGDALKGKVGGKGLKTFRFRIVDRIHMLELLVGFYLLFCGCYDLMYGKNHFFIFLYIQALAFFIMAFGYVGTFIPNS

SEQ ID NO: 2793 - protein, 533 aa, Cocos nucifera
MERVSSTAILPEAFQGARDDITEQMGLVWQQIKAPVIVPLLRLTVFLCLAMSVMLFVEKVYMAVVIVIVKLLGKPPEKRYKWEPMRDDLELGNSAYPMVLLQIPMYNEKEVYQLSIGAACGLSWPSDRIVIQVLDDSTDPVIKDLVELECQRWASKGINIKYEIRDNRNGYKAGALKEGMKHSYVKDCDYVAIFDADFQPEPDFLFRTIPFLVHNPELALVQARWKFVNSDECLMTRMQEMSLDYHFTVEQEVGSSTHAFFGFNGTAGVWRISALREAGGWKDRTTVEDMDLAVRASLKGWKFVFLGDLKVKSELPSALKAYRYQQHRWSCGPANLFRKMFLEIARNKKVSLFKKVHVIYNFFFVRKIVAHIVTFVFYCLVIPATVLVPEVEIPTWGAVYIPSVITLLNAVGTPRSLHLLVFWILFENVMSLHRTKATFIGLLEAGRVNEWVVTEKLGDALKTKVAANAARKPRIRIGDRLHLLELGVGAYLFFCGCYDVAFGKNHYFIFLFLQAIAFFIVGLGYVGTFVPHS

SEQ ID NO: 2794 - protein, 533 aa, Vitis vinifera
MDRLSSTTLLPDELQGTRDDISEQLGVVWSQIKAPVIVPLMSIAVAVCLAMSLMLFFERVYLSIVIVLVKLFGRKPDKRYKWEPMKDDVELGNSAYPMVLVQIPMYNEKEVYQLSIGAACGLSWPSDRIIIQVLDDSTDPTIKDLVELECQRWASKGINIKYEIRNNRNGYKAGALKEGMKHSYVKECDYVAIFDADFQPEPDFLWRTVPFLVHNPEIALVQARWKFVNSDECLMTRMQEMSLDYHFTVEQEVGSSTYAFFGFNGTAGVWRIAALNEAGGWKDRTTVEDMDLAVRASLKGWKFVYLGTLKVKNELPSTFKAYRYQQHRWSCGPANLFRKMVMEIVRNKKVSLWKKVHVIYSFFIVRKLVAHIVTFVFYCVVLPATVLVPDIEVPRWGAVYIPTIITILNAVGTPRSLHLMVFWILFENVMSLHRTKATFIGLLEGGRVNEWVVTEKLGDALKVKAATKAPKKPRFKIGERLHLLELGVGAFLFFCGCYDVAFGRNHYFIYLYVQAIAFFIVGFGYVGTFVPKS

SEQ ID NO: 2795 - protein, 532 aa, Mimulus guttatus
MDQFSSTAVLPEPFSGARDDITEQFMIIWGQIKAPLIVPLLNIAVFLCLTMSAMLFIERVYMAVVISLIKLFGRKPDKRYKWEPLKDDLELGNSSYPMVLVQIPMYNEKEVYQLSIGAACGLSWPSDRIIVQVLDDSTDPIIKNMVEIECQRWASKGINIKYEIRDNRNGYKAGALKQGLKHSYVKQCDFVAIFDADFQPEPDFLWKTIPFLVHNPELALVQARWKFVNADECLMTRMQEMSLDYHFTVEQEVGSSTYAFFGFNGTAGVWRIAAIDEAGGWKDRTTVEDMDLAVRASLKGWKFLYLGSLQVKNELPSTFKAYRYQQHRWSCGPANLFRKMVVEIIRNKKVTLWKKVHVIYSFFFIRKIVAHIVTFVFYCVVLPATVLVPEVYIPKWGAIYIPSIITILNAVGTPRSLHLLVFWILFENVMSLHRTKATFIGLLEAGRVNEWIVTEKLGDAFKLKSALKAFKKPRFKIGERVHFLEVATGAYLFFCGCYDVVFGKNHYYICLYVQAIAFFIMGFSYIGTFVPS

SEQ ID NO: 2796 - protein, 532 aa, Sesamum indicum
MEQFSSSTLLPDTFAGGRGDMTEQFLVIWSQIRAPLIVPLLRVAVFLCLAMSAMLFVERVYMAVVITLVKLFGRKPDKRYKWEPLKDDLELGNSAYPMVLVQIPMYNEKEVYQLSIGAACGLSWPSDRIIIQVLDDSTDPIIKNLVEMECQRWASKGINIKYEIRDNRNGYKAGALKEGLKHSYVKQCDYVAIFDADFQPEPDFLWRTIPFLVHNSQLALVQARWKFVNADECLMTRLQEMSLDYHFTVEQEVGSSTYAFFGFNGTAGVWRIAAINEAGGWKDRTTVEDMDLAVRASLKGWKFLYLGSLKVKNELPSTFKAYRYQQHRWSCGPANLFRKMLVEIIRNTKVSLWKKVHVIYSFFFIRKIVAHIVTFVFYCVVLPATVLVPEVQIPKWGAVYVPSIITLLNAVGTPRSLHLLVFWILFENVMSLHRTKATFIGLLEAGRVNEWIVTEKLGDAHKLKSALKAFRRPRFRLGERIHLLELATGGYLFFCGCYDIVFGKNHYFIYLFLQATAFFIMGFGYIGTFVPS

SEQ ID NO: 2797 - protein, 533 aa, Euonymus alatus
MEKLSSTTLLPDTFQGVSDDLSLQLSIIWGQIKAPLIVPLLRLAVVICLAMSLMLFIERIYMGIVIVLIKFFGRKPEKRYKWEPIKDDIEIGNSAYPMVLVQIPMYNEREVYQLSIGAACGLSWPSDRIMIQVLDDSTDPTIKDLVELECQRWGSKGINMKYEVRNNRNGYKAGALKEGMKHSYVKNCDFVAIFDADFQPEPDFLWRTIPFLVHNPQLGLVQARWKFVNSDECLMTRMQEMSLDYHFTVEQQVGSSTYAFFGFNGTAGVWRISALNEAGGWKDRTTVEDMDLAVRASLRGWKFLYLGTLKTKNELPSTFKAYRYQQHRWSCGPANLFRKMVMEIILNKKVTLWKKIHVIYSFFLVRKIIAHLVTFFFYCVVLPATVLVPEVEVPKWGAVYIPSIITILNAVGTPRSLHLLVFWILFENVMSLHRSKATLVGLLEAARVNEWIVTEKLGDVLKSKAAIKAPKKARFRFGERLHMLELGMGAYLFFIGCYDVVFGKNHYYFYLYVQALAFFIMGFGYVGTFVPNS

SEQ ID NO: 2798 - protein, 529 aa, Euonymus alatus
MERLSSTTLLPETFQGARDDLSLQLSIIWAQIKDPLIVPLLKLAVIICLAMSLMLFIERVYMGIVIVLIKIFGQKPEKRYKWEPIKDDIEIGNSAYPMVLVQIPMYNEREVYQLSIGAACGLSWPSDRIIIQVLDDSTDPTIKDLVEMECQRWGSKGINIKYEVRDNRSGYKAGALKEGMKRSYVKHCDFVAIFDADFQPEPDFLWRTIPFLVHNPRLGLVQARWKFVNSDECLMTRMQEMSLDYHFTVEQEVGSSTHAFFGFNGTAGVWRISAINEAGGWKDRTTVEDMDLAVRASLKGWKFLYLGILKVKNELPSTFKAYRYQQHRWSCGPANLFRKMAMEIVLNKKVTLWKKIHVIYSFFLVRKIIAHLVTFFFYCIVLPATVLVPEVEVPKWGSVYIPSIITILNAVGTPRSLHLMVFWILFENVMSLHRSKATLVGLLETARVNEWIVTEKLGDALKSKAPKKPRIRLGGRLHMLELGVGAYLFFIGCYDVLFGKNHYYFYLYVQASAFFIMGFGYIGTIVPNS

SEQ ID NO: 2799 - protein, 533 aa, Nicotiana benthamiana
MERISTTTLLPDTFYGTRDDITEQFAIMWEQIKAPLIVPLLRIAVLLCLAMSVMLFIERVYMFIVISLVKLFGTKPEKRYKWEPLKDDVELGNSSYPMVLVQIPMYNEKEVYQLSIGAACGLSWPSDRIIVQVLDDSTDPFTKNLVEMECQRWASKGINIKYEVRDNRSGYKAGALKEGLKHSYVKQCDYVAIFDADFQPEPDFLWRTIPFLVHNPELSLVQARWKYVNADECLMTRMQEMSLDYHFTVEQEVGSATHAFFGFNGTAGVWRIAAIDEAGGWKDRTTVEDMDLAVRASLKGWKFLYLSSLMVKNELPSTFKAYRYQQHRWSCGPANLFRKMFMEIVRNKKVSLWKKVHVIYSFFFVRKVVAHIVTFVFYVVVLPASVLVPEVEVPKWGAVYIPAIITLLNAVGTPRSLHLLVFWILFENVMSLHRTKATFIGLLEVGRVNEWIVTEKLGDALKLKSAAKAFRKHRMRLGDRIHLLELAAGAYLFFCGCYDIAFGNNHYFLYLFIQAFAFFIVGFGYVGTFVPNS

SEQ ID NO: 2800 - protein, 520 aa, Elaeis guineensis
FQGARDDITEQMGLVWQQIKAPVIVPLLRLTVFLCLAMSVMLFVEKVYMAVVIVIVKLLGKRPEKRYRWEPMRDDLELGNSAYPMVLLQIPMYNEKEVYQLSIGAACGLSWPSDRIIIQVLDDSTDPVIKDLVELECQRWASKGINIKYEIRDNRNGYKAGALKEGMKHSYVKDCDYVAIFDADFQPEPDFLFRTIPFLVHNPELALVQARWKFVNSDECLMTRMQEMSLDYHFTVEQEVGSLTYAFFGFNGTAGVWRISALREAGGWKDRTTVEDMDLAVRASLKGWKFVFLGDLKVKNELPSTLKAYRYQQHRWSCGPANLFRKMLLEIVRNKKVSLFKKVHVIYNFFFVRKIVAHIVTFVFYCLVIPATVLVPEVQIPKWGAVYIPSIITLLNAVGTPRSLHLLVFWILFENVMSLHRTKATFIGLLEVGRVNEWVVTEKLGDALKMKMAAKATRKPRIRIGDRLHLLELGVGAYLFFCGCYDVAFGKNHFFIYLFLQATAFFIVGFGYVGTFVSHS

SEQ ID NO: 2801 - protein, 532 aa, Rosmarinus officinalis
MERLSSTTVLPETFSGVHDDMTEQFLIIWGQIKAPLIVPLLNVAVFLCLAMSAMLFIERVYMAVVITLVKIFGGKPDKRYKWEPLKDDLEHGNSTYPMVLVQIPMFNEREVYQLSIGAACGLSWPSDRIIVQVLDDSTDHTIKNMVEMECQRWASKGINIKYEIRDNRNGYKAGALKEGLKRSYVKQCEYVAIFDADFQPEPDFLWRTIPFLVHNSELALVQARWKFVNANECLMTRMQEMSLDYHFTVEQEVGSSTYAFFGFNGTAGVWRIAAIEEAGGWKDRTTVEDMDLAVRASLKGWKFLYLGSLEVKNELPSTFKAYRYQQHRWSCGPANLFRKMLSEIIKNKKVSLWKKVHVIYSFFFIRKIVAHIVTFMFYCVVLPATVLVPEVEIPKWGAVYIPSIITLLNAVGTPRSLHLLVFWILFENVMSLHRAKATMIGLLEAGRVNEWIVTEKLGDALRLKSALKAFKKPRFRIGDRIHFLELATGCYLFFCGCYDIAFGKNHFFIYLFVQATAFFVMGFGYVGTFVPS

SEQ ID NO: 2802 - protein, 533 aa, Amborella trichopoda
MDRLSRTGLLPEAFQGTGDDITDQMAIIWQQIRAPLIVPLLKLAVFLCLIMSLMLFMERVYMAVVIVLVKLFGKKPGKRYKWEAIKDDLELGNANYPMVLVQIPMYNEKEVYQLSIGAACGLSWPSDRIIIQVLDDSTDPTIKDLVELECQRWASKGINIKYEIRDNRNGYKAGALKEGMKHGYVRDCDYVAIFDADFQPEPDFLWRTIPFLIHNPEIGLVQARWKFVNSDECLMTRMQEMSLDYHFTVEQEVGSSTYAFFGFNGTAGVWRIAALNEAGGWKDRTTVEDMDLAVRASLKGWKFVYLGDLKVKNELPSTFKAYRYQQHRWSCGPANLFRKMAMEIFRNKRVSLWKKIHVIYNFFFVRKIVAHIVTFVFYCVVIPATVLVPEVEIPKWGAVYIPSTITILNALSSPRSLHLVVFWILFENVMSLHRTKATFIGLAEARRVNEWVVTEKLGDALKGKAGGKSVKKFWIRIGGKLHLLELGVGAYLFFCACYDLAFGKNHYFIYLYLQAMAFFIMGFGYIGTFVPHS

SEQ ID NO: 2803 - protein, 532 aa, Brassica juncea
MELGDSSAVIPDSFMGYRDDITMQMSMILDQIRAPLIVPVLRLAVYICLTMSVMLFVERVYMGIVISLVKLFGRKPEKRFKWEPMKDDIELGNSVYPMVLVQIPMYNEREVYQLSIGAACGLSWPSDRIVIQVLDDSTDPTIKDLVEMECSRWASKGVNIKYEIRDNRNGYKAGALKEGMKKSYVKSCDYVAIFDADFQPEPDYLWRTVPFLLHNPKLALVQARWKFVNSDECLMTRMQEMSLDYHFMVEQEVGSSTYAFFGFNGTAGIWRISALNEAGGWKDRTTVEDMDLAVRASLKGWKFLYLGSLKVKNELPSTFKAYRYQQHRWSCGPANLFRKMAFEIMTNKNVTLWKKVHVIYSFFVVRKIVAHIVTFIFYCVVLPATVLVPEVTVPKWGAVYIPSIITLLNAVGTPRSLHLMVFWILFENVMSLHRTKATFIGLLEGGRVNEWIVTEKLGDLKAKSATKAPKKLRFRFGDRIHVLELGVGMYLFSVGCYDALFGKNHYYLYLFAQAIAFFIAGCGQIGTIVPNY

SEQ ID NO: 2804 - protein, 532 aa, Brassica napus
MELGDSSAVIPDSFMGYRDDITMQMSMILDQIRAPLIVPVLRLAVYICLTMSVMLFVERVYMGIVISLVKLFGRKPEKRFKWEPMKDDIELGNSVYPMVLVQIPMYNEREVYQLSIGAACGLSWPSDRIVIQVLDDSTDPTIKDLVEMECSRWASKGVNIKYEIRDNRNGYKAGALKEGMKKSYVKSCDYVAIFDADFQPEPDYLWRTVPFLLHNPKLALVQARWKFVNSDECLMTRMQEMSLDYHFTVEQEVGSSTYAFFGFNGTAGIWRISALNEAGGWKDRTTVEDMDLAVRASLKGWKFLYLGSLKVKNELPSTFKAYRYQQHRWSCGPANLFRKMAFEIMTNKNVTLWKKVHVIYSFFVVRKIVAHIVTFIFYCVVLPATVLVPEVIVPKWGAVYIPSIITLLNAVGTPRSLHLMVFWILFENVMSLHRTKATFIGLLEGGRVNEWIVTEKLGDLKAKSATKAPKKLRFRFGDRIHVLELGVGMYLFSIGCYDALFGKNHYYLYLFAQAIAFFIAGCGQIGTVVPNY

SEQ ID NO: 2805 - protein, 532 aa, Brassica napus
MELGDSSAVIPDSFMGYRDDITMQMTMILDQIRAPLIVPVLRLAVYICLTMSVMLFVERVYMGIVISLVKLFGRKPEKRFKWEPMKDDIEHGNSVYPMVLVQIPMYNEREVYQLSIGAACGLSWPSDRIVIQVLDDSTDPTIKDLVEKECSRWASKGINIKYEIRDNRNGYKAGALKEGMKKSYVKSCDYVAIFDADFQPEPDYLWRTVPFLLHNPKLALVQARWKFVNSDECLMTRMQEMSLDYHFTVEQEVGSSTYAFFGFNGTAGIWRISALSEAGGWKDRTTVEDMDLAVRASLKGWKFLYLGSLKVKNELPSTFKAYRYQQHRWSCGPANLFRKMALEIMTNKNVTLWKKVHVIYSFFVVRKIVAHIVTFIFYCVVLPATVLVPEVTVPKWGAVYIPSIITLLNAVGTPRSLHLMVFWILFENVMSLHRTKATFIGLLEGGRVNEWIVTEKLGDLKAKSATKTLKKLRFRFGDRIHVLELGVGMYLFFVGCYDVFFGKNHYYLYLFAQAIAFFIAGLGQIGTIVPNS

SEQ ID NO: 2806 - protein, 526 aa, Citrus clementina
MDAASAATIIFPDRISGQMGLMWQQTKAPLIVPLLKLLVYLCLALSIMLFVERVYMGIVIVLLKLFGRKPEKRYKWEAIKDDVELGNSAYPMVLVQIPMYNEKEVYQLSIGAACGLSWPSDRITIQVLDDSTDPTIKDLVELECQRWASKGINIKYEIRDNRNGYKAGALKEGMKHSYVKQCDYVAIFDADFQPEPDFLWRTIPFLVHNPDIALVQARWKFVNADECLMTRMQEMSLDYHFTVEQEVGSSTYAFFGFNGTAGVWRISALNEAGGWKDRTTVEDMDLAVRASLKGWKFVYVGDLKVKNELPSTFKAYRYQQHRWSCGPANLFKKMVGEIMRTKKVTLWKKLYVIYSFFFVRKVVAHIVTFVFYCVLLPATVLFPEVEVPKWGAVYIPSIITLLNAVGTPRSLHLLVFWILFENVMSLHRTKATFIGLLEAGRVNEWVVTEKLGDVKSKLGGKTLKKPRIRIGERVHVLELGVGAYLFLCGCYDVAFGKNHYFIYLFLQSIAFFVAGVGYVGTFVPNS

SEQ ID NO: 2807 - protein, 532 aa, Eutrema parvulum
MELGDSAAVIPDSFMGYRDDITMQMSMILDQIRAPLIVPVLRLGVYICLTMSVMLFVERVYMGIVISLVKLFGRKPEKRFKWEPMKDDIELGNSVYPMVLIQIPMYNEREVYQLSIGAACGLSWPSDRIVIQVLDDSTDPTIKDLVEMECSRWASKGVNIKYEVRDNRNGYKAGALKEGMKKSYVKSCDYVAIFDADFQPEPDFLWRTVPFLLHNPKLALVQARWKFVNADECLMTRMQEMSLDYHFTVEQEVGSSTYAFFGFNGTAGIWRISALSEAGGWKDRTTVEDMDLAVRASLKGWQFLYLGSLKVKNELPSTFKAYRYQQHRWSCGPANLFRKMAFEIMTNKNVTLWKKVHVIYSFFVVRKIVAHIVTFIFYCVILPATVLVPEVSVPKWGAVYIPSVITLLNAVGTPRSLHLMVFWILFENVMSLHRTKATFIGLLEGGRVNEWIVTEKLGDLKAKSATKTPKKLRFRFGDRIHVLELGVGMYLFFVGCYDAFFGKNHYYLYLFAQAIAFFIAGFGQIGTFVPNS

SEQ ID NO: 2808 - protein, 532 aa, Brassica oleracea
MELGDSSAVIPDSFMGYRDDITMQMSMILDQIRAPLIVPVLRLAVYICLTMSVMLFVERVYMGIVISLVKLFGRKPEKRFKWEPMKDDIEHGNSVYPMVLVQIPMYNEREVYQLSIGAACGLSWPSDRIVIQVLDDSTDPTIKDLVEKECSRWASKGINIKYEIRDNRNGYKAGALKEGMKKSYVKSCDYVAIFDADFQPEPDYLWRTVPFLLHNPKLALVQARWKFVNSDECLMTRMQEMSLDYHFTVEQEVGSSTYAFFGFNGTAGIWRISALSEAGGWKDRTTVEDMDLAVRASLKGWKFLYLGSLKVKNELPSTFKAYRYQQHRWSCGPANLFRKMAFEIMTNKNVTLWKKVHVIYSFFVVRKIVAHIVTFIFYCVILPATVLVPEVTVPKWGAVYIPSIITLLNAVGTPRSLHLMVFWILFENVMSLHRTKATFIGLLEGGRVNEWIVTEKLGDLKAKSATKTPKKLRFRFGDRIHVLELGVGMYLFFVGCYDVFFGKNHYYLYLFAQAIAFFIAGLGQIGTIVPNS

SEQ ID NO: 2809 - protein, 532 aa, Brassica rapa
MELGDSSAVIPDSFMGYRDDITMQISMILDQIRAPLIVPVLRLAVYICLTMSVMLFVERVYMGIVISLVKLFGRKPEKRFKWEPMKDDIELGNSVYPMVLVQIPMYNEREVYQLSIGAACGLSWPSDRIVIQVLDDSTDPTIKDLVEMECSRWASKGVNIKYEIRDNRNGYKAGALKEGMKKSYVKSCDYVAIFDADFQPEPDYLWKTVPFLLHNPKLALVQARWKFVNSDECLMTRMQEMSLDYHFTVEQEVGSSTYAFFGFNGTAGIWRISALNEAGGWKDRTTVEDMDLAVRASLKGWKFLYLGSLKVKNELPSTFKAYRYQQHRWSCGPANLFRKMAFEIMTNKNVTLWKKVHVIYSFFVVRKIVAHIVTFIFYCVVLPATVLVPEVIVPKWGAVYIPSIITLLNAVGTPRSLHLMVFWILFENVMSLHRTKATFIGLLEGGRVNEWIVTEKLGDLKAKSATKAPKKLRFRFGDRIHVLELGVGMYLFSIGCYDALFGKNHYYLYLFAQAIAFFIAGCGQIGTVVPNY

SEQ ID NO: 2810 - protein, 532 aa, Brassica oleracea
MELGDSAAVIPDSFMGYRDDITMQMSMILDQIRAPLIVPVLRLAVYICLTMSVMLFVERVYMGIVISLVKLFGRKPEKRFKWEPMKDDIELGNSVYPMVLVQIPMYNEREVYQLSIGAACGLSWPSDRIVIQVLDDSTDPTIKDLVEMECSRWASKGVNIKYEIRDNRNGYKAGALKEGMKKSYVKSCDYVAIFDADFQPEPDYLWKTVPFLLHNPKLALVQARWKFVNSDECLMTRMQEMSLDYHFTVEQEVGSSTYAFFGFNGTAGIWRISALNEAGGWKDRTTVEDMDLAVRASLKGWKFLYLGSLKVKNELPSTFKAYRYQQHRWSCGPANLFRKMAFEIMTNKNVTLWKKVHVIYSFFVVRKIVAHIVTFIFYCVVLPATVLVPEVIVPKWGAVYIPSIITLLNAVGTPRSLHLMVFWILFENVMSLHRTKATFIGLLEGGRVNEWIVTEKLGDLKAKSATKAPKKLRFRFGDRIHVLELGVGMYLFSIGCYDALFGKNHYYLYLFAQAFAFFIAGCGQIGTVVPNY

SEQ ID NO: 2811 - protein, 526 aa, Musa acuminata
MDRLTSTARLPESFQGTRDDIGGQMGMVWQQIKAPVIVPLLRLAVFLCLVMSVMLVVEKVYMAVVIVLVKLFGRRPEKRYKWEPMRDDLELGSSAYPMVLVQIPMYNEKEVYQLSIGAACGLSWPSDRIIIQVLDDSTDPVIKDLVELECQRWASKGVDIKYEIRDNRNGYKAGALKEGMKRSYVKHCDYVVIFDADFQPEPDFLWRAIPFLIHNPDVGLVQARWKFVNSDECLMTRMQEMSLDYHFTVEQEVGSSTYAFFGFNGTAGVWRIAALNEAGGWKDRTTVEDMDLAVRASLKGWKFVKNELPSTFKAYRYQQHRWSCGPANLFRKMVMEIKNNKKVGLWKKVHVIYSFFFVRKVVAHIVTFVFYCIVIPATVLVPEVEIPKWGAVYIPSIITLLNAVGTPRSLHLLVFWILFENVMSLHRTKATFIGLLEAGRVNEWVVTEKLGDTKKPKMAAKAARKLRIRIGDRLHLLELWTGAYLFVCGCYDVAFGNSHFFIYLFLQAMAFFIVGFGYVGTFVPST

SEQ ID NO: 2812 - protein, 526 aa, Citrus sinensis
MDAASAATIIFPDRISGQMGLMWQQTKAPLIVPLLKLLVYLCLALSIMLFVERVYMGIVIVLLKLFGRKPEKRYKWEAIKDDVELGNSAYPMVLVQIPMYNEKEVYQLSIGAACGLSWPSDRITIQVLDDSTDPTIKDLVELECQRWASKGINIKYEIRDSRNGYKAGALKEGMKHSYVKQCDYVAIFDADFEPEPDFLWRTIPFLVHNPDIALVQARWKFVNADECLMTRMQEMSLDYHFTVEQEVGSSTYAFFGFNGTAGVWRISALNEAGGWKDRTTVEDMDLAVRASLKGWKFVYVGDLKVKNELPSTFKAYRYQQHRWSCGPANLFKKMVGEIMRTKKVTLWKKLYVIYSFFFVRKVVAHIVTFVFYCVLLPATVLFPEVEVPKWGAVYIPSIITLLNAVGTPRSLHLLVFWILFENVMSLHRTKATFIGLLEAGRVNEWVVTEKLGDVKSKLGGKTLKKPRIRIGERVHVLELGVGAYLFLCGCYDVAFGKNHYFIYLFLQSIAFFVAGVGYVGTFVPNS

SEQ ID NO: 2813 - protein, 534 aa, Prunus persica
MERLSTTTFIPDTFLGARDDFSMQMGVLWSKIRAPLIVPLLRITIVLCLIMSVMLFIERLYMGIVIVLIKLFGRKPDKRYNWEPMKDDVELGNSAYPMVLVQIPMYNEREVYQLSIRAACGLSWPSDRIIIQVLDDSTDSTVKDMVELECQRWASKGINIKYEIRDNRNGYKAGALKEGMKRSYVKHCDYVAIFDADFQPESDFLCRTIPFLVHNPEIALVQTRWKFVNSNECLMTRMQEMSLDYHFTVEQEVGSSTHAFFGFNGTAGVWRIAAINEAGGWKDRTTVEDMDLAVRASLKGWKFVYLGSIKVKNELPSTFKAYRYQQHRWSCGPANLFRKMVMEIIRNKKVSLWKKIHVIYSFFFVRKIIAHINAFVFYCIVLPATVLVPEVVVPKWGGIYIPSIITLLNAVGTPRSLHLLVFWILFENVMSLHRTKATIIGLLEASRVNEWIVTEKLGDALKTLTVAAKLPRKPRIRIGERLHLLELAVGCYLFFCGTYDFAFGKNYVFLFLYIQAMAFYIIGFGYVGTFVPNS

SEQ ID NO: 2814 - protein, 532 aa, Brassica rapa
MELGDSAAVIPDSFMGYRDDITMQMTMILDQIRAPLIVPVLRLAVYICLTMSVMLFVERVYMGIVISLVKLFGRKPEKRFKWEPMKDDIEHGNSVYPMVLVQIPMYNEREVYQLSIGAACGLSWPSDRIVIQVLDDSTDPTIKDLVEKECSRWASKGINIKYEIRDNRNGYKAGALKEGMKKSYVKSCDYVAIFDADFQPEPDYLWRTVPFLLHNPKLALVQARWKFVNSDECLMTRMQEMSLDYHFTVEQEVGSSTYAFFGFNGTAGIWRISALSEAGGWKDRTTVEDMDLAVRASLKGWKFLYLGSLKVKNELPSTFKAYRYQQHRWSCGPANLFRKMAFEIMTNKNVTLWKKVHVIYSFFVVRKIVAHIVTFIFYCVILPATVLVPEVTVPKWGAVYIPSIITLLNAVGTPRSLHLMVFWILFENVMSLHRTKATFIGLLEGGRVNEWIVTEKLGDLKAKSATKTLKKLRFRFGDRIHVLELGVGMYLFFVGCYDVFFGKNHYYLYLFAQAIAFFIAGLGQIGTIVPNS

SEQ ID NO: 2815 - protein, 532 aa, Orobanche aegyptiaca
MDQFSSTNLLPETFSGARDDFTEQFSIIWGQIKAPLIVPLLNIAVILCLAMSAMLFVERVYMAIVISLVKLFGKKPDKMYKWEPLKDDLELGNSVYPMVLVQIPMYNEKEVYQLSIGAACGLSWPSDRIIVQVLDDSTDPIIKNLVEMECQRWASKGINIKYEIRDNRNGYKAGALKEGLKHSYVKQCDYVAIFDADFQPEPDFLWQTVPFLVHNPQLALVQARWKFVNADECLMTRMQEMSLDYHFTVEQEVGSSTYAFFGFNGTAGVWRIAAIEEAGGWKDRTTVEDMDLAVRASLKGWKFLYLGSIKVKNELPSTFKAYRYQQHRWSCGPANLFRKMAIEILRNKKVSLWKKVHVIYSFFFIRKIVAHLVTFVFYCVVLPATVLVPEVHIPKWGAIYIPSIITLLNAVGTPRSLHLLVFWILFENVMSLHRTKATFIGLLEAGRVNEWIVTEKLGDALKLKSTLKAFRRPRFRIGERVHLFELATGGYLFFCGCYDIAFGKNHYYIYLFVQAIAFFILGFGYVGTFVPS

SEQ ID NO: 2816 - protein, 532 aa, Sciadopitys verticillata
MGRMSSSGLIPETFQGARDDMTEQLALIWEQLRAPLIVPLLRLAVFICLAMSVMLFVERVYMAVVIVLVKLFGKKPEKKYKWEPVKDDIELGNSAYPMVLVQIPMYNEKEVYQLSIGAACGLSWPSDRIIIQVLDDSTDPTIKDMVAMECQRWASKGINIKYEIRDNRNGYKAGALKEGMKRSYVKDCDYVAIFDADFQPEPDYLWRTIPFLMYNPELGLVQARWKFVNSDECLMTRMQEMSLDYHFTVEQEVGSSTYAFFGFNGTAGVWRINALNEAGGWKDRTTVEDMDLAVRASLKGWKFVFIGDLTVKNELPSTFKAYRYQQHRWSCGPANLFRKMVMEIIRNKKVTAWKKFHVIYAFFFVRKIVAHLVTFIFYCVIIPATVLVPEVHLPKWGAVYIPSIITLLNAVSTPRSLHLLVFWILFENVMSLHRTKATIIGLLEAGRVNEWIVTEKLGDALKHKPGKQVKKTRSRIGERLHVLELLTGVYLFFCASYDLAFGKNHFYIYLYLQAAAFFVMGFGYIGTFVPTS

SEQ ID NO: 2817 - protein, 532 aa, Eutrema halophilum
MELGDSAAVIPDSFMGYRDDITMQMSMILDQIRAPLIVPVLRLGVYICLTMSVMLFVERVYMGIVISLVKLFGRKPEKRFKWEPMKDDIEHGNSVYPMVLVQIPMYNEREVYQLSIGAACGLSWPSDRIVIQVLDDSTDQTIKDLVEMECSRWASKGVNIKYEIRDNRNGYKAGALKEGMKKSYVKSCDYVAIFDADFQPESDFLWKTVPFLLHNPKLALVQARWKFVNSDECLMTRMQEMSLDYHFTVEQEVGSSTYAFFGFNGTAGIWRISALNEAGGWKDRTTVEDMDLAVRASLKGWKFLYLGSLKVKNELPSTFKAYRYQQHRWSCGPANLFRKMAFEIMTNKNVTLWKKVHVIYSFFVVRKLVAHIVTFIFYCVILPATVLVPEVSVPKWGAVYIPSVITLLNAVGTPRSLHLMVFWILFENVMSLHRTKATFIGLLEGGRVNEWIVTEKLGDLKAKSATKTPKKLRFRFGDRIHVLELGVGMYLFFVGCYDAFFGKNHYYLYLFAQAIAFFIAGFGQIGTFVPNS

SEQ ID NO: 2818 - protein, 535 aa, Theobroma cacao
MDQISETSRTMIPGTFQVSQDDITGQVGLIWQQTKAPLIVPVLKGMVVLCLAMSIMLFVERVYMGIVIVFVKLFGRKPEKMYKLEPMKDDVELGYSAYPMVLVQIPMYNEKEVYQLSIGAACGLSWPADRIIIQVLDDSTDPAIKTLVELECQRWASKGINVKYEIRDNRNGYKAGALKEGMKHSYVNQCDYVAIFDADFQPEPDFLWRTIPFLVSNPEIALVQARWKFVNSDECLMTRMQEMSLDYHFIVEQEVGSSTHAFFGFNGTAGVWRISALNEAGGWKDRTTVEDMDLAVRASLKGWKFVYVGDLKVKNELPSTFKAYRYQQHRWSCGPANLFRKMAVEIIRNRKVSLWKKFYVIYSFFFVRKIVAHLVTFIFYCVVLPATVFVPEVEVPKWGAVYIPSIVTLLNAVGTPRSLHLLIFWILFENVMSLHRTKATFIGLLEAGRVNEWVVTEKLGDALKTKLGGKAPRKPRIQIGERIHLLELAVGAYLFFCGCYDLAFGKNRYFIFLFLQSIAFFIAGVGYVGTFVPTS

SEQ ID NO: 2819 - protein, 534 aa, Prunus mume
MERLSTTTFIPDTFLGARDDFSMQMGVLWSKIRAPLIVPLLRITIVLCLIMSVMLFIERLYMAIVIVLIKLFGRKPDKRYNWEPMKDDVELGNSAYPMVLVQIPMYNEREVYQLSIGAACGLSWPSDRIIIQVLDDSTDSTVKDMVELECQRWASKGINIKYEIRDNRNGYKAGALKEGLKRSYVKHCDYVAIFDADFQPESDFLCRTIPFLVHNPELALVQTRWKFVNSNECLMTRMQEMSLDYHFTVEQEVGSSTHAFFGFNGTAGVWRIAAINEAGGWKDRTTVEDMDLAVRASLKGWKFVYLGSIKVKNELPSTFKAYRYQQHRWSCGPANLFRKMVMEIIRNKKVSLWKKVHVIYSFFFVRKIIAHINAFVFYCIVLPATVLVPEVVVPKWGGIYIPSIITLLNAVGTPRSLHLLVFWILFENVMSLHRTKATIIGLLEASRVNEWIVTEKLGDALKTLTVAAKLPRKPRIRIGERLHLLELAVGCYLFFCGTYDFAFGKNYFYLFLYIQAMAFYIIGFGYVGTFVPNS

SEQ ID NO: 2820 - protein, 530 aa, Pinus pinaster
MDRLSSANLLPESFPSNDMTEQLALIWRQIRAPLIAPLLRFAVGICLIMSLMLFIERVYMAVVIVLVKLFGKRPEKRYKWEPIRDDIELGNSAYPMVLVQIPMYNEKEVYQLSIGAACGLSWPSDRIIIQVLDDSTDPAIKELVTMECQRWASKGINIKYEIRDNRNGYKAGALKEGMKRSYVKECDYVAIFDADFQPEPDYLWRTIPFLVHNPELALVQARWKFVNSDECLMTRMQEMSLDYHFTVEQEVGSSTHAFFGFNGTAGVWRINALNEAGGWKDRTTVEDMDLAVRASLKGWKFVFVGDLKVKNELPSTFKAYRYQQHRWSCGPANLFRKMVKEILRNKKVTPWKKFHVIYAFFFVRKIVAHIVTFAFYCVVIPATVLVPEVQVPKWGAVYIPSIITLLNAVSTPKSLHLLVFWILFENVMSLHRTKATFIGLLEAGRVNEWVVTEKLGDAMKHKSGKQIKKSRSRIGERLHVLELFAGVYLFFCASYDLAFGKNHFYIYLYLQAAAFFVMGFGYIGTFVPTS

SEQ ID NO: 2821 - protein, 530 aa, Populus trichocarpa
MDRLSSASNMFPAGRDGVTGQIGLIWQVIIEPLIVPVLKLLVVVCLGMSIMLFIERVYMGVVIVFVKLFGKKPNKRYKWEPIKDDIELGNSAYPMVLVQVPMYNEKEVYQLSIGAACGLSWPSDRIIIQVLDDSTDPAIKSMVEVECQRWASKGINIKYEIRDNRNGYKAGALKEGMKHSYVKQCDYVAIFDADFQPEPDFLWRTIPFLAHNPEIALVQARWKFVNSDECLMTRMQEMSLDYHFTVEQEVGSATYAFFGFNGTAGVWRISAVNEAGGWKARTTVEDMDLAVRASLKGWKFVYVGDLKVKNELPSTFKAYRYQQHRWSCGPANLFRKMAIEIVKNKKVSLWKKCYVIYSFFFVRKIVAHIVTFLFYCVVLPATVLVPEVTVPKWGAVYIPSVVTLLNAVGTPRSLHLMVFWILFENVMSLHRTKATFIGLLEAGRVNEWVVTEKLGDALKAKLPAKATKKPRIRIGERLHLLELCAGAYLFFCGCYDFAFGKNRYYIFLFLQSIAFFIAGFGYIGTFVPHS

SEQ ID NO: 2822 - protein, 533 aa, Musa acuminata
MDRLSSTAILPEAFQGARDDITEQLGVVWQQIKAPVIVPLLRLSVLLCLAMSVMLFVEKVYMAVVIVLVKLFRRRPETRYKWEPMGDDAELGNAAYPMVLVQIPMYNEKEVYQLSIGAACGLSWPSDRIIIQVLDDSTDPAIKELVQIECRRWASKGVNIKYEIRDNRNGYKAGALKEGMKHSYVKQCDYVAVFDADFQPEPDFLWRTIPFLVHNPQIGLVQGRWKFVNSNECLMTRMQEMSLDYHFTVEQEVGSSTYAFFGFNGTAGVWRIAALNEAGGWKDRTTVEDMDLAVRASLRGWKFIFLGDLKVKSELPSTLKAYRYQQHRWSCGPANLFRKMAMDIARNKNVTLWTKVHVIYSFFFVRKIVAHIVTFIFYCVVIPATVLVPEVEVPNWGLVYIPSTITLLNAVGTPRSLHLLVFWILFENVMSLHRTKATLIGLLEAGRVNEWVVTEKLGDVMKTKVAAKAARKPRIRIGDRLHLLELFTGAYLFFCGCYDLSFGKNHYYLYLFLQAITFFVVGFGYVGTFVPQT

SEQ ID NO: 2823 - protein, 530 aa, Pinus taeda
MDRLSSANLLPESFPSNDMTEQLALIWRQIRAPLIAPLLRFAVGICLIMSLMLFIERVYMAVVIVLVKLFGKRPEKRYKWEPIRDDIELGNSAYPMVLVQIPMYNEKEVYQLSIGAACGLSWPSDRIIIQVLDDSTDPAIKELVTMECQRWASKGINIKYEIRDNRNGYKAGALKEGMKRSYVKDCDYVAIFDADFQPEPDYLWRTVPFLVHNPELALVQARWKFVNSDECLMTRMQEMSLDYHFTVEQEVGSSTHAFFGFNGTAGVWRINALNEAGGWKDRTTVEDMDLAVRASLKGWKFVFVGDLKVKNELPSTFKAYRYQQHRWSCGPANLFRKMVMEILRNKRVTPWKKFHVIYAFFFVRKIVAHIVTFAFYCVVIPATVLVPEVQVPKWGAVYIPSIITLLNAVSTPKSLHLLVFWILFENVMSLHRTKATFIGLLEAGRVNEWVVTEKLGDAMKHKSGKQIKKSRSRIGERLHVLELFAGVYLFFCASYDLAFGRNHFYIYLYLQAAAFFVMGFGYIGTFVPTS

SEQ ID NO: 2824 - protein, 532 aa, Podocarpus macrophillus
MDQLSTSGLLPETFQGARDDMTEQLALIWEQIRAPIIAPLLSLAVVFCLMMSVMLFVERVYMCVVIVLVKLFGKRPEKRYKWEPIKDDIELGNSAYPMVLVQIPMYNEREVYQLSIGAACGLSWPSDRIIIQVLDDSTDPTIKEMVSIECQRWASKGINIKYEIRDNRNGYKAGALKEGMKRSYVKECDYVAIFDADFQPEPDYLWRTIPFLMHNPELALVQARWKFVNSDECLMTRMQEMSLDYHFTVEQEVGSSTHAFFGFNGTAGVWRIHALNEAGGWKDRTTVEDMDLAVRASLKGWKFVFIGDLSVKNELPSTFKAYRYQQHRWSCGPANLFRKMVMEIIRNKKVTPWKKFHVIYAFFFVRKIVAHIVTFTFYCVVIPATVLVPEVSIPKWGAVYIPSIITLLNAVSTPRSLHLLVFWILFENVMSLHRTKGTIIGLLEAGRVNEWIVTEKLGDALKHKSVKHVKKPRSRIGERLHVLEVLTGVYLFFCASYDLAFGKNHFYIYLYLQAAAFFVMGFGYIGTFVPTS

SEQ ID NO: 2825 - protein, 533 aa, Solanum phureja
MEGLSRTNLVSDTFYGTRDDITEQFGIMWGQIKAPLIVPLLRISVFLCLAMSVMLFIERVYMFVVITLLKVFGTKPEKRYKWEPLKDDVELGNSSYPMVLVQIPMYNEKEVYQLSIGAACGLSWPSDRIIVQVLDDSTDPITKNLVDIECQRWASKGINIKYEVRDNRSGYKAGALKEGLKHSYVKQCDFVAIFDADFQPEPDFLWQTIPFLVHNPELSLVQARWKYVNADECLMTRMQEMSLDYHFSVEQEVGSSTHAFFGFNGTAGVWRIAAIDEAGGWKDRTTVEDMDLAVRASLKGWKFLFLGSVKVKNELPSTLKAYRYQQHRWSCGPANLFRKMCMEIIRNKKVSLWKKVHVIYSFFFVRKVVAHIVTFVFYVVVLPATVLVPEVEVPKWGAVYIPAIITLLNAVGTPRSLHLLVFWILFENVMSLHRTKATFIGLLEAGRVNEWIVTEKLGDALKLKSATKAFKKHRMRLGDRIHLLEFAAGAYLFFCGCYDIAFGTNHYFLYLFIQSFAFLIVGFGYVGTFIPNS

SEQ ID NO: 2826 - protein, 534 aa, Arabidopsis lyrata
MELGDSTTSVIPDSFMGYRDDITMQMSMVLDQIRAPLIVPVLRLGVYICLTMSVMLFVERVYMGIVISLVKLFGRKPDKRFKYEPMKDDIELGNSVYPMVLVQIPMFNEREVYQLSIGAACGLSWPSDRIVIQVLDDSTDPTIKDLVEMECSRWASKGVNIKYEIRDNRKGYKAGALKEGMKKSYVKSCDYVAIFDADFQPEPDFLWRTVPYLLHNPKLALVQARWKFVNSDECLMTRMQEMSLDYHFTVEQEVGSSTYAFFGFNGTAGIWRISALNEAGGWKDRTTVEDMDLAVRASLKGWKFLYLGSLKVKNELPSTFKAYRYQQHRWSCGPANLFRKMAFEIMTNKNVTLWKKVHVIYSFFVVRKLVAHIVTFIFYCVILPATVLVPEVSVPKWGAVYIPSVITLLNAVGTPRSLHLMVFWILFENVMSLHRTKATFIGLLEGGRVNEWIVTEKLGDVKAKSATKTPKKVLRFRFGDRIHVLELGVGMYLLFVGCYDAFFGKNHYYLYLFAQAIAFFIAGFGQIGTIVPNH

SEQ ID NO: 2827 - protein, 532 aa, Cephalotaxus harringtonia
MDRLSSSGLIPETFQGARDDMTEQLALIWEQIRTPIIVPLLKLAVVICLAMSVMLFVERVYMAVVIVLVKLFGKRPEKRYRWEPIKDDIELGNSAYPMVLVQIPMYNEKEVYQLSIGAACGLSWPSDRIVIQVLDDSTDPTIKDMVIMECQRWASKGINIKYEVRDNRNGYKAGALKEGMRRSYVKDCDFVAIFDADFQPEPDYLWRTIPFLMQNPELGLVQARWKFVNSDECLMTRMQEMSLDYHFTVEQEVGSSTHAFFGFNGTAGVWRINAINEAGGWKDRTTVEDMDLAVRASLKGWKFVFIGDLSVKNELPSTFKAYRYQQHRWSCGPANLFRKMVREIIRNKKVSAWKKFHVIYAFFFVRKIVAHLVTFIFYCVVIPATVLVPEVTIPKWGAVYIPSIITLLNAVSTPRSLHLLVFWILFENVMSLHRTKATIIGLLEAGRVNEWVVTEKLGDALKHKSGKQIKKSRSRIGERLHVVELLTGVYLFFCASYDLAFGKNHFFIYLYLQAAAFFVMGFGYIGTFVPTS

SEQ ID NO: 2828 - protein, 530 aa, Pseudotsuga menziesii
MDRLSSGNLLPESFQGNDMTEQLALIWGQIRAPLIAPLLRFAIAICLIMSLMLFIERVYMAVVIVLVKLFGKRPEKRYKWEPIRDDIELGNSAYPMVLVQIPMYNEREVYQLSIGAACGLSWPSDRIIIQVLDDSTDPTIKEMVTMECQRWASKGINIKYEIRDNRNGYKAGALKEGMKRSYVKECDYVAIFDADFQPEPDYLWRTIPFLMHNPELALVQARWKFVNSDECLMTRMQEMSLDYHFTVEQEVGSSTHAFFGFNGTAGVWRINALNEAGGWKDRTTVEDMDLAVRASLKGWKFVFVGDLSVKNELPSTFKAYRYQQHRWSCGPANLFRKMIMEILRNKKVTAWKKFHVIYAFFFVRKIVAHLVTFTFYCVVIPATVLVPEVQVPKWGAVYIPSIITLLNAVSTPKSLHLLVFWILFENVMSLHRTKATIIGLLEAGRVNEWVVTEKLGDAMKHKSGKQTKKSRSRIGERLHVLELFAGVYLFFCASYDLAFGKNHFYIYLYLQAAAFFVMGFGYIGTFVPTS

SEQ ID NO: 2829 - protein, 530 aa, Abies balsamea
MDRLSSANLLPESFQSNDMTEQLALIWRQIRAPLIAPLLRFAIVICLMMSVMLFLERVYMAIVIVLVKLFGKRPEKRYRWEPIRDDIELGNSAYPMVLVQIPMYNEKEVYQLSIGAACGLSWPSDRIIIQVLDDSTDPTIKELVTMECQRWASKGINIKYEIRDNRNGYKAGALKEGMKRSYVKDCDYVAIFDADFQPEPDYLWRTIPFLVHNPELALVQARWKFVNSDECLMTRMQEMSLDYHFTVEQEVGSSTYAFFGFNGTAGVWRINALNEAGGWKDRTTVEDMDLAVRASLKGWKFVFVGDLSVKNELPSTFKAYRYQQHRWSCGPANLFRKMVMEILRNKKVTAWKKFHVIYAFFFVRKIVAHLVTFTFYCVVIPATVLVPEVQVPKWGAVYIPSIITLLNAVSTPKSLHLLVFWILFENVMSLHRTKATIIGLLEAGRVNEWVVTEKLGDVLKHKSGKQIKKSRSRIGERLHVLELLAGIYLFFCASYDLAFGKNHFYIYLYLQAAAFFVMGFGYIGTFVPTS

SEQ ID NO: 2830 - protein, 535 aa, Allium cepa
MERLSSTALLPESFQGARDDVTEQFGLIWHQIKAPLIVPLLRLLVSLCLIMSAMLFVEKVYMAIVIVLVKIFGKKPEKAYKWEPMKDDLEMGASANYPTVLIQIPMYNEKEVYQLSIGAACGLSWPSDRIIIQVLDDSTDPAIKDMVEMECKRWESKGINIKYEIRDNRKGYKAGALKEGMKHNYVKQCDYVAIFDADFQPEPDFLWRTVPFLVHNPQVGLVQARWKFVNADECLMTRMQEMSLDYHFTVEQEVGSATYAFFGFNGTAGVWRIAALNEAGGWKDRTTVEDMDLAVRASLRGWKFVFLGDVKVKNELPSTLKAYRYQQHRWSCGPANLFRKMVMEIARNKKVTLLKKIHVIYNFFFVRKIVAHIVTFVFYCMVIPATVLVPEVEIPKWGAVYIPSIITLLNAVGTPRSLHLMVFWILFENVMSLHRTKATFIGLLEAGRVNEWVVTEKLGDALKNKANANKGFKRPRMRLGDRLHVLELGVGAYLFFCGCYDIAFGKNHYFIYLYVQAIAFFIVGFGYVGTFVPGS

SEQ ID NO: 2831 - protein, 511 aa, Glycine max
MESFQGSRDDISYQMGLIWSQVKEPVIVPMLRVSVFLCLAMSLMMLVERVYMGIVICLVKLFGRRPEKRYKWEPMKDDVELGNSSYPMVLVQVPMYNEREVYQLSIGAACGLSWPSDRIIIQVLDDSTNPTIKELVQMECSRWASKGVNIKYEVRDNRDGYKAGALKEGMKRNYVKQCDYVAIFDADFQPDPDFLWRTVPFLVNNPELALVQARWKFVNANECLMTRMQEMSLDYHFTVEQEVGSCTYAFFGFNGTAGVWRISALYESGGWNHRTTVEDMDLAVRASLRGWKFLYLPNLKVKNELPSTLNAYRFQQHRWSCGPANLFMKMFMEIMRNRKVSLYKKIYVIYSFFFVRKVVAHINTFMFYCIVLPATVVVPEVVVPKWGAVYIPSIITLLNAVGTPRSLHLLVFWILFENTMSLHRTKATIIGLLEGSRANEWIVTQKGKPPKSRFRIRIHHMLELLVGFYLFFCGCYDIMFGKNRYYIFLYIQSIAFFIMAFGYVGIFDPNS

SEQ ID NO: 2832 - protein, 511 aa, Glycine max
MESFQGDRDDISYQMGLIWSQVKEPVIVPMLRVAVFLCLAMSLMMLVERVYMGIVICLVKLFSRRPEKRYKWEPMKDDVELGNSSYPMVLVQVPMYNEREVYQLSIGAACGLSWPSDRIIIQVLDDSTNPTIKELVQMECSRWASKGVNIKYEVRDNRDGYKAGALKEGMKRSYVKQCDYVAIFDADFQPEPDFLWRTVPFLVNNPELGLVQARWKFVNANECLMTRMQEMSLDYHFTVEQEVGSCTYAFFGFNGTAGVWRISALYESGGWNHRTTVEDMDLAVRASLRGWKFLYLPNLKVKNELPSTLNAYRFQQHRWSCGPANLFMKMFMEIMRNRKVSLYKKIYVIYSFFFVRKVVAHLNTFMFYCIVLPATVVVPEVVVPKWGAVYIPSIITLLNAVGTPRSLHLLVFWILFENTMSLHRTKATIIGLLEGSRANEWIVTQKGKPPKSRFRIRIHHMLELLVGFYLFFCGCYDIMFGKNRYYIFLYIQSIAFFIMAFGYVGIFDPNT

SEQ ID NO: 2833 - protein, 537 aa, Cucumis sativus
MAERISSEALLPTETAFEGTINDMSFQVISLPWDAIRAPLVVPLLRLSVFLCLIMSLMLFVERVYMGIVISFVKLFGRKPEKRFKWEPMKDDIELGNSVYPMVLIQIPMYNEKEVYQLSIGAACGLSWPSDRIIIQVLDDSTDPMIKDLVEMECQRWASKGINIKYEIRDNRNGYKAGALKEGLKRSYVKQCDFVAIFDADFQPEPDFLWRTVPFLLHNPNIALVQARWKFVNANECFLTRMQEMSLDYHFTVEQEVGSSTYAFFGFNGTAGVWRIAALNEAGGWKDRTTVEDMDLAVRASLKGWKFLYLGDLKVKNELPSSLKAYRYQQHRWSCGPANLLRKMIMEIITNKKVTAWKKVHVIYSFFFVRKVVAHINTFVFYCIVLPATVLVPEVEVPKWGSVYIPSIITLLNAVGTPRSLHLLVYWILFENVMAMHRTKGTIIGLLEASRVNEWIVTEKLGDASKPKLAAKTPKKPRFWIGERVLMWELGVGAYLFICGIYDIFFGKNQYFIFLFLQAIAFCIVGFGFVGTHVSSF

SEQ ID NO: 2834 - protein, 517 aa, Brassica juncea
GYRDDITMQMSMILDQIRAPLIVPVLRLAVYICLTMSVMLFVERVYMGIVISLVKLFGRKPEKRFKWEPMKDDIELGNSVYPMVLVQIPMYNEREVYQLSIGAACGLSWPSDRIIIQVLDDSTDPTIKDLVEMECSRWASKGVNIKYEIRDNRNGYKAGALKEGMKKSYVKSCDYVAIFDADFQPEPDYLWKTVPFLLHNPKLALVQARWKFVNSDECLMTRMQEMSLDYHFTVEQEVGSSTYAFFGFNGTAGIWRISALNEAGGWKDRTTVEDMDLAVRASLKGWKFLYLGSLKVKNELPSTFKAYRYQQHRWSCGPANLFRKMAFEIMTNKNVTLWKKVHVIYSFFVVRKIVAHIVTFIFYCVILPATVLVPEVIVPKWGAVYIPSIITLLNAVGTPRSLHLMVFWILFENVMSLHRTKATFIGLLEGGRVNEWIVTEKLGDLKAKSATKAPKKLRFRFGDRIHVLELGVGMYLFSVGCYDALFGKNHYYLYLFAQAIAFFIAGCGQIGTVVPNY

SEQ ID NO: 2835 - protein, 533 aa, Musa acuminata
MDRLSSTAILPEAFQGTRDDITQQMGIVWEQIRTPVVVPLLRLSVFLCLVMSVMLFVEKVYMAVVIVLVKLFRWRPETRYKWEPMGDDAELGNAGYPMVLIQIPMYNEKEVYQLSIGAACGLSWPSDRIIIQVLDDSTDPAIKELVQIECQRWASKGVNIKYEIRDNRNGYKAGALKEGMKHSYVKRCDYVAIFDADFQPEPDFLWRTIPFLEHNPRIGLVQGRWKFVNSNDCLMTRMQEMSLDYHFTVEQEVGSSTYAFFGFNGTAGVWRINALNEAGGWKDRTTVEDMDLAVRASLKGWKFIFLGDLRVKSELPSTLTAYRYQQHRWSCGPANLFRKMVLEIAKNKKVTLWTKVHVIYSFFFVRKIVAHIVTFIFYCVVIPATVLVPEVQVPKWGLVYIPSIITLLNAVGTPRSLHLLVFWILFENVMSLHRTKATFIGLLEAGRVNEWVVTEKLGDGMKTKAGAKAAKIPRIRIGERLHLLELLTGAYLVFCGCYDLAFGKNYYYLYLFFQAVAFFIVGFGYVGTFVPHP

SEQ ID NO: 2836 - protein, 530 aa, Populus trichocarpa
MDRVSSASNIFPTGRDDITGQFGLIWQVLKEPLIVPALKLLVVVCLGMSIMLFIERVYMGIVIVFVKLFGKKPNKMYKWEPMKDDIEVGNSAYPMVLVQIPMYNEKEVYQLSIGAACGLSWPSDRIIIQVLDDSTDPAIKSLVELECQRWASKGINIKYEIRDNRKGYKAGALKEGMKHSYVKQCDYVAIFDADFQPEPNYLWRTIPFLVHNPEIALVQARWKFVNSDECLMTRMQEMSLDYHFTVEQEVGSATYAFFGFNGTAGVWRISAVNEAGGWKDRTTVEDMDLAVRASLKGWKFVYVGDLKVKNELPSTFKAYRYQQHRWSCGPANLFKKMAIEIIKNKKVSLWKKCYVIYSFFFVRKIVAHIVTFVFYCVVLPSTVLVPEVSVPKWGAVYIPSIVTLLNAVGTPRSLHLMVFWILFENVMSLHRTKATFIGLLEIGRVNEWVVTEKLGDALKGKLPAKATKKPRIRIRERLHLLELCAGAYLFFCGCYDFAFGKNRYYIFLFLQSIAFFIAGFGYIGTFVPNS

SEQ ID NO: 2837 - protein, 533 aa, Solanum lycopersicum
MEGLSGTNIVYNTFYGTRDDITEQFGIMWGQIKAPLIVPLLRISVFLCLVMSVMLFVERVYMFVVITLLKVFGKKPQKKYKWEPLKDDVELANSSYPMVLVQIPMYNEKEVYQLSIGAACGLSWPSDRIIVQVLDDSTDPITKNLVEIECQRWANKGINIKYEVRDNRNGYKAGALKEGLKHSYVKQCDFVAIFDADFQPEPDFLWQTIPFLVHNHELSLVQARWKYVNADECLMTRMQEMSLDYHFSVEQEVGSSTHAFFGFNGTAGVWRIAAIDEAGGWKDRTTVEDMDLAVRASLKGWKFLFLGSVKVKNELPSTLKAYRYQQHRWSCGPANLFRKMCMEIIRNKKVSLWKKVHVIYSFFFVRKVVAHIVTFVFYVVVLPATVLVPEVEVPKWGAVYIPAIITLLNAVGTPRSLHLLVFWILFENVMSLHRTKATFIGLLEAGRVNEWIVTEKLGDALKLKSATKAFKKHRMRLGDRIHLLEFAAGAYLFFCGCYDIAFGTNHYFLYLFIQAFAFLIVGFGYVGTFIPNS

SEQ ID NO: 2838 - protein, 534 aa, Aquilegia formosa
MDRFPSTTLLPEAFQGTSSDDITEQLGYIWYQIKTPLIVPLMKILLVVCLAMSIMLFIERVYMAIVILFLKIFGQKPEKRYKWETIKDDVELGNSAYPMVLVQIPMYNEREVYSLSIGAACGLSWPSDRIIIQVLDDSTDPVIKDMVEIECQRWKSKGINIKYEIRDNRNGYKAGALKEGLKHNYVKLCDYVAIFDADFQPEPDFLWRTVPFLVHNPEIGLVQARWKFVNSDECLMTRMQEMSLDYHFTVEQEVGSSTYAFFGFNGTAGVWRIAAINEAGGWKDRTTVEDMDLAVRASLKGWKFVYVGALKVRNELPSTFKAYRYQQHRWSCGPANLFRKMVVEIWRNKRVTLWKKLYVIYSFFFVRKIVAHIVTFVFYCVVIPTTVFVPEVEIPKWGAVYIPSIITILNAVGTPRSLHLLVFWILFENVMSLHRTKATFIGLLEAGRVNEWVVTEKLGDVLKVKPSAKAPKKPHLKIGERLHLLELGFGAYLFFCACYDFAFGKNHYFIYLYLQAIAFFIAGFGYVGTFVPNS

SEQ ID NO: 2839 - protein, 542 aa, Musa acuminata
MDRLTSTALLPESFQGARDDITEQMGMVWQQIKAPVMVPLLRLAVFLCLVMSVMLVVEKAYMAVVIVLVKLFGRRPEKRYRWEPMRDDLELGSSSYPMVLVQIPMYNEKEVYQLSIGAACGLSWPSDRIIIQVLDDSTDPVIKDLVEAECRRWASKGVNIKYEIRDNRSGYKAGALKEGMKHSYVNHCDYVAIFDADFQPEPDFLCRTVPFLLHNPAVGLVQARWKFGGLTRANFAVNSDECLMARMQEMSLDYHFTVEQEVGSSTYAFFGFNGTAGVWRIAALNEAGGWKDRTTVEDMDLAVRASLKGWKFVFLGDLKVKNELPSTLRAYRYQQHRWSCGPANLFRKMAMEIANNKKVSLWKKVHVIYSFFFVRKVVAHIVTFVFYCVVIPAAVLVPEVEIPRWGAIYIPSIITLLNAVGTPRSLHLLVFWILFENVMSLHRTKATLIGLLEAGRVNEWVVTEKLGDTVKAKMAVKAARKPPIRIGDRLHLLELWTGAYLFFCGCYDVAFGKNHYFLYLFLQAIAFFVVGFGYVGTFVPGY

SEQ ID NO: 2840 - protein, 530 aa, Cedrus atlantica
MDRLSTANLLPETFQGNDMTEQLALIWRQIRAPLIAPLLRFAVVICLMMSLMLFVERVYMAVVIVLVKLFGKRPEKRYRWEPIRDDIELGNSAYPMVLVQIPMYNEKEVYQLSIGAACGLSWPSDRIIIQVLDDSTDPTIKELVTMECQRWASKGINIKYEIRDNRNGYKAGALKEGMKRSYVKDCDYVAIFDADFQPEPDYLWRTIPFLMHNPELALVQARWKFVNSDECLMTRMQEMSLDYHFTVEQEVGSSTHAFFGFNGTAGVWRINALNEAGGWKDRTTVEDMDLAVRASLKGWKFVFVGDLSVKNELPSTFKAYRYQQHRWSCGPANLFRKMVMEILRNKKVTAWKKLHVIYAFFFVRKIVAHIVTFTFYCVVIPATVLVPEVQVPKWGAVYIPSIITLLNAVSTPKSLHLLVFWILFENVMSLHRTKATIIGLLEAGRVNEWVVTEKLGDVLKHKSAKQIKKSRLRIGERLHVLELLAGVYLFFCASYDLAFGKNHFYIYLYLQAAAFFVMGFGYIGTFVPTS

SEQ ID NO: 2841 - protein, 534 aa, Citrullus lanatus
MESISSATLLPETFQETRDDISFQVISLAWEAIKVPVVVPLLRMSVFICLIMSLMLFLERVYMGIVIVLVKLLRRKPEKRYKWEPMKDDIELGNSVYPMVLIQIPMYNEKEVYQLSIGAACGLSWPSDRIMIQVLDDSTDPIIKDLVEMECQRWASKGINIKYEIRDNRNGYKAGALKEGLKRSYVKQCDFVAIFDADFQPEPDFLWRTVPFLLHNPKIALVQARWKFVNANECFLTRMQEMSLDYHFTVEQEVGSSTYAFFGFNGTAGVWRIAALNEAGGWKDRTTVEDMDLAVRASLKGWKFLYLGDLKVKNELPSSLKAYRYQQHRWSCGPANLLRKMIMEIITNKKVTMWKKVHVIYSFFFVRKVVAHINTFVFYCVVLPATVLVPEVEVPKWGSVYIPSIITLLNAVGTPRSFHLLVYWILFENVMAMHRTKGTIIGLLEASRVNEWIVTEKLGDASKPKPTLKTPKQPRFRLGERVLLWELGVGAYLFFCGIYDIFFGTNQFFIFLFLQATAFFIVGFGFVGTHVSSF

SEQ ID NO: 2842 - protein, 533 aa, Arabidopsis thaliana
MELGDTTSVIPDSFMGYRDDITMQMSMVLDQIRAPLIVPALRLGVYICLTMSVMLFVERVYMGIVISLVKLFGRKPDKRFKYEPIKDDIELGNSAYPMVLIQIPMFNEREVYQLSIGAACGLSWPSDRIVIQVLDDSTDPTIKDLVEMECSRWASKGVNIKYEIRDNRNGYKAGALKEGMKKSYVKSCDYVAIFDADFQPEADFLWRTVPYLLHNPKLALVQARWKFVNSDECLMTRMQEMSLDYHFTVEQEVGSSTYAFFGFNGTAGIWRISALNEAGGWKDRTTVEDMDLAVRASLKGWKFLYLGSLKVKNELPSTFKAYRYQQHRWSCGPANLFRKMAFEIMTNKNVTLWKKVHVIYSFFVVRKLVAHIVTFIFYCVILPATVLVPEVTVPKWGAVYIPSVITLLNAVGTPRSLHLMVFWILFENVMSLHRTKATFIGLLEGGRVNEWIVTEKLGDVKAKSATKTSKKVIRFRFGDRIHVLELGVGMYLLFVGCYDAFFGKNHYYLYLFAQAIAFFIAGFGQIGTIVPNH

SEQ ID NO: 2843 - protein, 528 aa, Manihot esculenta
MDHLSSESVIFDSYGFSGQVGMIWQVVKAPLIVPVLKLLVMICLVMSIMLFIERVYMGVVIAFVKLFGRKPNKRYKWEAIKDDIELGNSAYPMVLVQIPMYNEKEVYQLSIGAACGLSWPSDRIIIQVLDDSTDPAIKSLVEMECQRWANKGINIKYEIRDNRNGYKAGALKEGMKHSYVKQCDYVAIFDADFQPEPDFLWRTIPFLLHNPHIALVQARWKFVNSDECLMTRMQEMSLDYHFTVEQEVGSSTYAFFGFNGTAGVWRISALNEAGGWKDRTTVEDMDLAVRASLKGWKFVYIADLKVKNELPSTFKAYRYQQHRWSCGPANLFKKMAMEIIRNKKVSMWKKFYVIYSFFFVRKIVAHIVTFLFYCVVLPATVLVPEVEVPKWGYVYIPSTITLLNAVGTPRSLHLLIFWVLFENVMSMHRTKATFIGLLEAGRVNEWVVTEKLGDALKIKSTTKASRKPRLRIGERMHMQELGVGAYLFFCGCYDFAFGKNSYFIYLFLQSMAFFISGIGYVGTFVPTS

SEQ ID NO: 2844 - protein, 533 aa, Citrus sinensis
MGRLAAATVLPNSALGGTDDIAVQLSLLWGWIKAPLIVPLLNIAVFLCLIMSLMLLIERVYMSIVILLLKLSGRSPETRYKFQPMKEDVELGNSSYPMVLVQIPMFNEREVYQLSIGAACGLSWPSDRLIIQVLDDSTDLTIKDMVELECQRWASKGINIKYEVRDNRKGYKAGALREGMKRGYVKSCDFVVIFDADFQPESDFLTRTIPFLVHNPQLALVQARWEFVNADECLMTRLQEMSLDYHFTVEQEVGSSTHAFFGFNGTAGVWRIAAVNEAGGWKDRTTVEDMDLAVRASLKGWKFLYLGTVKVKNELPSTFKAYRYQQHRWSCGPANLFRKMVMEIVRNKKVSLWKKVHVIYSFFFVRKIIAHIITFVLYCVVLPATVVIPEVQVPKWAAVYIPTVITILNAVGTPRSIHLLVFWILFENVMSLHRTMATFIGLLEGVRVNEWIVTEKLGGALKAKAAAKAPRLRRFFFGDRIYLLELGVGAFLFSCGCYDVLFGNNHYFIYLFVQALAFFVMGFGYVGIYVPHT

SEQ ID NO: 2845 - protein, 533 aa, Capsicum annuum
MERLTTTNILPNTFYGRRDDITEQFGIMWRQIKAPLIVPILKILVFLCLVMSIMLFIERVYMFLVITFLKFFGKKPEKRYKWEPLKDDVELGNSSYPMVLVQIPMYNEKEVYQLSIGAACGLSWPSDRIIVQVLDDSTDPITKNLVEMECQRWGSKGINIKYEVRDNRNGYKAGALKEGLKHSYVKQCDFVAIFDADFQPEPDFLWHTIPFLVHNPQLSLVQARWKYVNADECLLTRLQEMSLDYHFSVEQEVGSSTHAFFGFNGTAGVWRIAAIEEAGGWKDRTTVEDMDLAVRASLKGWKFLFLGSVKVKNELPSTLKAYRYQQHRWSCGPANLFRKMCMEIARNKKVSLWKKVHVIYSFFFVRKVVAHIVTFVFYIVVLPATVLVPEVVVPKWGAVYIPAIITILNAVGTPRSFHLLVFWILFENVMSLHRAKATFIGLLEAGRVNEWIVTEKLGDAFKLKSATKAFKKHRMRLGDRIHLLEFAAGAYLFFCGCYDIAFGNNHYFLYLFIQAFAFLIVGFGYVGTFVPNS

SEQ ID NO: 2846 - protein, 530 aa, Picea glauca
MDRLSSANLLPESFQGNDMTDQLALIWRQMRAPLIAPLLRFAVGICLIMSLMLFVERVYMAVVIVLVKLFGKRPEKRYKWEPIRDDIELGNSAYPMVLVQIPMYNEKEVYQLSIGAACGLSWPSDRIIIQVLDDSTDPAIKELVTMECQRWASKGINIKYEIRDNRNGYKAGALKEGMKRGYVKECDYVAIFDADFQPEPDYLWRTIPFLMHNPEVALVQARWKFVNSDECLMTRMQEMSLDYHFTVEQEVGSSTHAFFGFNGTAGVWRINALNEAGGWKDRTTVEDMDLAVRASLKGWKFVFVGNLSVKNELPSTFKAYRYQQHRWSCGPANLFRKMVMEILRNKKVTAWKKFHVIYAFFFVRKIVAHIVTFAFYCVVIPATVLVPEVQVPKWGAVYIPSIITLLNAVSTPKSLHLLVFWILFENVMSLHRTKATIIGLLEAGRVNEWVVTEKLGDAMKHKSGKQMKKSRSRIGERLHVLELLAGVYLFFCASYDLAFGKNHFYIYLYLQAAAFFVMGFGYIGTFIPTS

SEQ ID NO: 2847 - protein, 546 aa, Quercus alba
MDRLSSSTILPDAFQGARDDISMQLEIIWAQIKAPLIVPLLRISVVLCLIMSVMLFIERVYMGIVIVLIKLFGRKPEKRYKWEAIKDDVELGNSAHPMVLVQIPMYNEREVYQLSIGAACGLSWPSDRIIIQVLDDSTDPTIKDLVELECQRWASKGINIKYEIRDNRNGYKAGALKEGMKRSYVKHCDYVAILDADFQPEPDFLWRTIPFLTHNPQLALVQARWKFVNSDECLMTRIQEMSLDYHFTVEQEVGSSTYAFFGFNGTAGVWRIAALNEAGGWKDRTTVEDMDLAVRASLKGWKFLYLGGVQVKNELPSTLKAYRYQQHRWSCGPANLFRKMVVEIIRNKKVSLWKKLHVIYSFFFIRKIIAHISTFVFYCIVLPATVVVPEVAVPKWGSVYIPSLITLLNAVGTPRSLHLMVFWILFENVMSLHRMKATIIGLLETNRANEWIVTEKLGDAFKAKAGLKAPRKPRFRIGGRLHLLELAVGAYLLFIGWYDVFFGKNHFFLFLFMQAAASWGLGTLAPLSQTLRGTPTMILKFFLPFC

SEQ ID NO: 2848 - protein, 330 aa, Glycine max
MALNNGVPATGTGLIVSFGEMLIDFVPTVSGVSLAEAPGFLKAPGGAPANVAIAVSRLGGKAAFVGKLGDDEFGHMLAGILKENGVRADGITFDQGARTALAFVTLRADGEREFMFYRNPSADMLLKPEELNLELIRSAKVFHYGSISLIVEPCRSAHLKAMEVAKEAGCLLSYDPNLRLPLWPSPEEARKQILSIWEKADLIKVSDVELEFLTGSDKIDDESALSLWHPNLKLLLVTLGEHGSRYYTENFKGSVDAFHVNTVDTTGAGDSFVGALLSKIVDDQSILEDEPRLREVLKYANACGAITTTQKGAIPALPKEEDALKLIKGA

SEQ ID NO: 2849 - protein, 330 aa, Phaseolus vulgaris
MAFNNGVPATGSGLIASFGEMLIDFVPTVSGVSLAEAPGFLKAPGGAPANVAIAVARLGGKAAFVGKLGDDEFGHMLAGILKENGVRADGITFDQGARTALAFVTLRADGEREFMFYRNPSADMLLKPEELNLELIRSAKVFHYGSISLIVEPCRSAHLKAMEVAREAGCLLSYDPNLRLPLWPSADEARKQILSIWEKADLIKVSDVELEFLTGSDKIDDASALSLWHPNLKLLLVTLGEQGSRYYTKSFKGSVDAFHVNTVDTTGAGDSFVGALLSKIVDDQSILEDEPRLRDVLKFANACGAITTTQKGAIPALPKEEDALKIIKGA

SEQ ID NO: 2850 - protein, 330 aa, Cajanus cajan
MALNNGVPATGTGLIASFGEMLIDFVPTVSGVSLAEAPGFLKAPGGAPANVAIAVARLGGKAAFVGKLGDDEFGHMLAGILKENGVRGDGITFDEGARTALAFVTLRADGEREFMFYRNPSADMLLRPEELNLELIRSAKVFHYGSISLIVEPCRSAHLKAMEVAKEAGCLLSYDPNLRLPLWPSAEEARKQILSIWEKADLIKVSDVELEFLTGSDKIDDDSALSLWHPNLKLLLVTLGEHGSRYYTKNFHGSVDAFHVNTVDTTGAGDSFVGALLSKIVDDQAILEDEPRLREVLKFANACGAITTTKKGAIPALPKEEDALKLIKGA

SEQ ID NO: 2851 - protein, 330 aa, Glycyrrhiza uralensis
MALSNGVPSTGNGLIVSFGEMLIDFVPTVSGVSLAEAPGFLKAPGGAPANVAIAVSRLGGKAAFVGKLGDDEFGHMLAGILKENGVRADGITFDTGARTALAFVTLRADGEREFMFYRNPSADMLLKPEELNLELIRSAKVFHYGSISLIVEPCRSAHLKAMEVAKDAGCLLSYDPNLRLPLWPSAEEARKQILSIWEKADLIKVSDVELEFLTGSDKIDDASALSLWHPNLKLLLVTLGEHGSRYYTKNFHGSVDAFHVNTVDTTGAGDSFVGALLSKIVDDQSILEDEARLREVLKFSNACGAITTTKKGAIPALPKEEDVLNLIKGA

SEQ ID NO: 2852 - protein, 330 aa, Vigna unguiculata
MAFSNGVPATGTGLIASFGEMLIDFVPTVSGVSLAEAPGFLKAPGGAPANVAIAVARLGGKAAFVGKLGDDEFGHMLAGILKENGVRADGITFDQGARTALAFVTLRADGEREFMFYRNPSADMLLQPEELNLELIRSAKVFHYGSISLIVEPCRSAHLKAMEVAKEAGCLLSYDPNLRLPLWPSADEARKHILSIWEKADLIKVSDVELEFLTKSDKIDDASALSLWHPNLKLLLVTLGEQGCRYYTKNFKGSVDAFHVKTIDTTGAGDSFVGALLSKIVDDQTILEDESRLRDVLKFANACGAITTTQKGAIPALPKEEDALKLIKGA

SEQ ID NO: 2853 - protein, 332 aa, Lupinus angustifolius
MALNNGIPATGTGLIVSFGEMLIDFVPTVSGVSLAEAPGFLKAPGGAPANVAIAVARIGGKAAFVGKLGDDEFGHMLAGILKENGVRADGITFDTGARTALAFVTLRADGEREFMFYRNPSADMLLRPEELNLELIRSAKVFHYGSISLIVEPCRSAHLKAMEVAKEAGCLLSYDPNLRLPLWPSPEEARQQILSIWEKADLIKVSDVELEFLTGSDKIDDASALSLWHPNLKLLLVTVGEHGSKYYTKNFHGSVDAFHVKTIDTTGAGDSFVGSLLAKIVDDQSILEDEPRLREVLKFANACGAITTTKKGAIPALPKEEDVFNLIKESSA

SEQ ID NO: 2854 - protein, 330 aa, Lotus japonicus
MALNNGVPSTGTGLIVSFGEMLIDFVPTVSGVSLAEAPGFLKAPGGAPANVAIAVSRLGGNAAFVGKLGDDEFGHMLAGILKENGVRADGITFDEGARTALAFVTLRADGEREFMFYRNPSADMLLKPEELNLELIRSAKVFHYGSISLIVEPCRSAHLKAMEVAKDAGCLLSYDPNLRLPLWPSADEARKQILSIWDKADLIKVSDNELEFLTGSDKIDDESALSLWHPNLKLLLVTLGEHGSKYYTKNFRGTVEGYHVNTVDTTGAGDSFVGSLLSKIVDDQSILEDEPRLREVLKYSNACGAITTTKKGAIPALPKEEDVLKLINGA

SEQ ID NO: 2855 - protein, 328 aa, Cicer arietinum
MASSNGIPTGNGLIVSFGEMLIDFVPTTSGVSLAEAPGFLKAPGGAPANVAIAVSRLGGKAAFVGKLGDDEFGHMLAGILKENGVVADGITFDQGARTALAFVTLRADGEREFMFYRNPSADMLLKPEELNLELIRSAKVFHYGSISLIVEPCRSAHLKAMEVAKDAGCLLSYDPNLRLPLWSSADEARKQILSIWEKADLIKVSDVELEFLTGSDKIDDASALSLWHPNLKLLLVTLGENGSRYYTKNFHGSVDAFHVKAVDTTGAGDSFVGALLSKIVDDQSILEDEPRLREVLKFANACGAITTTKKGAIPALPKEEDVLSLIKA

SEQ ID NO: 2856 - protein, 330 aa, Vicia sativa
MASNNVFPPTGTGLIVSFGEMLIDFVPTVSGVSLAEAPGFLKAPGGAPANVAIAVNRLGGKAAFVGKLGDDEFGHMLAGILKENGVKTDGITFDQGARTALAFVTLRADGEREFMFYRNPSADMLLKPEELNLELIRSAKVFHYGSISLIVEPCRSAHLKALEVAKDAGCLLSYDPNLRLPLWPSADEARKQILSIWEKADLIKVSDNELEFLTGSDKIDDETALTLWHPNLKLLLVTLGEHGAKYYTKNFHGTVDAFHVNTIDTTGAGDSFVGALLAKIVDDQSILEDEPRLREVLKFANACGAITTTKKGAIPALPKEEDALKLINAA

SEQ ID NO: 2857 - protein, 329 aa, Trigonella foenum-graecum
MASNNGIPTTGTGLIVSFGEMLIDFVPTVSGVSLAEAPGFLKAPGGAPANVAIAVSRLGGKAAFVGKLGDDEFGHMLAGILKENGVVAEGITFDQGARTALAFVTLRADGEREFMFYRNPSADMLLKPEELNLELIRSAKVFHYGSISLIVEPCRSAHLKAMEVAKEAGCLLSYDPNLRLPLWPSADEARKQILSIWEKADLIKVSDNELEFLTGSDKIDDATALTLWHPNLKLLLVTLGEDGARYYTKNFHGQVDGFKVNTVDTTGAGDSFVGALLAKIVDDQAILEDESRLREVLKFANACGAITTTKKGAIPALPKEEDVLNLIKA

SEQ ID NO: 2858 - protein, 330 aa, Phaseolus vulgaris
MASTNALPPTGTGLVVSFGEMLIDFVPTVSGVSLAEAPGFLKAPGGAPANVAIAVARLGGKAAFVGKLGDDEFGHMLAAILKENDVRSDGINFDQGARTALAFVTLRADGEREFMFYRNPSADMLLTPEDLNLELIRSAKVFHYGSISLIVEPCRSAHLKAMEVAREAGCLLSYDPNLRLPLWPSPEEARQQILSIWEKADLIKVSDVELEFLTGSDKIDDESALSLWHPNLKLLLVTLGEHGSRYYTKNFHGSVDAFHVNTVDTTGAGDSFVGALLCKIVDDQSILEDEARLREVLKFANACGAITTTKKGAIPALPTEADALNLIKEA

SEQ ID NO: 2859 - protein, 329 aa, Medicago truncatula
MASSNGIPTTGTGLIVSFGEMLIDFVPTVSGVSLAEAPGFLKAPGGAPANVAIAVSRLGGKAAFVGKLGDDEFGHMLAGILKENGVVAEGITFDQGARTALAFVTLRADGEREFMFYRNPSADMLLKPEELNLELIRSAKVFHYGSISLIVEPCRSAHLKALEVAKEAGCLLSYDPNLRLPLWPSADEARKQILSIWEKADLIKVSDNELEFLTGSDKIDDATALTLWHPNLKLLLVTLGEHGARYYTKNFHGQVDGFKVNTVDTTGAGDSFVGALLAKIVDDQAILEDESRLREVLKFANACGAITTTKKGAIPALPKEEDVLNLIKA

SEQ ID NO: 2860 - protein, 330 aa, Cicer arietinum
MASNTPIPSTGEGLIVSFGEMLIDFVPTVSGVSLAEAPGFLKAPGGAPANVAIAVSRLGGKAAFVGKLGDDEFGHMLAGILKENNVRADGINFDKGARTALAFVTLRADGEREFMFYRNPSADMLLTPEDLNLELIRSAKVFHYGSISLIVEPCRSAHLKAMEVAKDAGCLLSYDPNLRLPLWPSPEEARNQILSIWDKADLIKVSDVELEFLTGSDKIDDASALSLWHPNLKLLLVTLGENGSRYYTKNFHGSVDAFHVNTVDTTGAGDSFVGALLGKIVDDQSILEDEARLREVLKFANACGAITTTKKGAIPALPTEADVLSLIKGE

SEQ ID NO: 2861 - protein, 330 aa, Vigna unguiculata
MASTNALPPTGSGLVVSFGEMLIDFVPTVSGVSLAEAPGFLKAPGGAPANVAIAVARLGGKAAFVGKLGDDEFGHMLAGILKENDVRSDGINFDQGARTALAFVTLRADGEREFMFYRNPSADMLLTPEDLNLELIRSAKVFHYGSISLIVEPCRSAHLKAMEVAREAGCLLSYDPNLRLPLWPSPEEARQQILSIWEKADVIKVSDVELEFLTGSDKIDDESALSLWHPNLKLLLVTLGEHGSRYYTKNFHGSVDAFHVNTVDTTGAGDSFVGALLCKIVDDQSILEDEARLREVLKFANACGAITTTKKGAIPALPTEADALNLIKEA

SEQ ID NO: 2862 - protein, 331 aa, Trifolium pratense
MASNTSLLPATGEGLIVSFGEMLIDFVPTVSGVSLAEAPGFLKAPGGAPANVAIAVSRLGGKSAFVGKLGDDEFGHMLAGILKENNVRADGINFDKGARTALAFVTLRADGEREFMFYRNPSADMLLTPEDLNLELIRSAKVFHYGSISLIVEPCRSAHLKAMEVAKDAGCLLSYDPNLRLPLWPSPEEARKQILSIWDKADLIKVSDVELEFLTGSDKIDDESALSLWHPNLKLLLVTLGENGSRYYTKNFKGSVDAFHVNAVDTTGAGDSFVGALLGKIVDDQSILEDEAKLREVLKFANACGAITTTKKGAIPALPTEADVLSLIKDA

SEQ ID NO: 2863 - protein, 330 aa, Arachis hypogaea
MASSNGIPATGSGLVVSFGEMLIDFVPTVSGVSLAEAPGFLKAPGGAPANVAIAVARLGGKAAFVGKLGDDEFGHMLAGILKENGVVADGITFDQGARTALAFVTLRADGEREFMFYRNPSADMLLKPEELNLELIRSAKVFHYGSISLIVEPCRSAHLKAMEVAKDAGCLLSYDPNLRLPLWPSAEEARKQIRSIWEKADLIKVSDVELEFLTESDKIDDEAAMSLWHPNLKLLLVTLGEHGSRYYTKNFHGSVDAFHVNTVDTTGAGDSFVGSLLAKIVDDQSILEDEARLRSVLTYSNACGAITTTKKGAIPALPKDEDVLALIRGA

SEQ ID NO: 2864 - protein, 331 aa, Trifolium pratense
MASNTSLLPATGEGLIVSFGEMLIDFVPTVSGVSLAEAPGFLKAPGGAPANVAIAVSRLGGKSAFVGKLGDDEFGHMLAGILKENNVRADGINFDKGARTALAFVTLRADGEREFMFYRNPSADMLLTPEDLNLELIRSAKVFHYGSISLIVEPCRSAHLKAMDVAKDAGCLLSYDPNLRLPLWPSPEEARKQILSIWDKADLIKVSDVELEFLTGSDKIDDASALSLWHPNLKLLLVTLGENGSRYYTKNFKGSVDAFHVNAVDTTGAGDSFVGALLGKIVDDQSILEDEAKLREVLKFANACGAITTTKKGAIPALPTEADVLSLIKDA

SEQ ID NO: 2865 - protein, 331 aa, Medicago truncatula
MASNASLLPATGSGLIVSFGEMLIDFVPTASGVSLAEAPGFLKAPGGAPANVAIAVSRLGGKSAFVGKLGDDEFGHMLAGILKENNVRGDGINFDKGARTALAFVTLRADGEREFMFYRNPSADMLLTPEDLNLELIRSAKVFHYGSISLIVEPCRSAHLKAMEVAKDAGCLLSYDPNLRLPLWPSPEEARKQILSIWDKADLIKVSDVELEFLTGSDKIDDASALSLWHPNLKLLLVTLGENGSRYYTKNFKGSVDAFHVNTVDTTGAGDSFVGALLGKIVDDQSILEDEARLREVLKFANACGAITTTKKGAIPALPTEADVLSLINKA

SEQ ID NO: 2866 - protein, 331 aa, Trigonella foenum-graecum
MATTTSLLPATGSGLIVSFGEMLIDFVPTSSGVSLAEAPGFLKAPGGAPANVAIAVSRLGGKSAFVGKLGDDEFGHMLAGILKENNVRGDGINFDKGARTALAFVTLRADGEREFMFYRNPSADMLLTPEDLNLELIRSAKVFHYGSISLIVEPCRSAHLKAMEVAKDAGCLLSYDPNLRLPLWPSPEEARKQILSIWDKADLIKVSDVELEFLTGSDKIDDASALSLWHPNLKLLLVTLGENGSRYYTKNFKGSVDAFHVNTVDTTGAGDSFVGALLGKIVDDQSILEDEARLREVLKFANACGAITTTKKGAIPALPTEADVLSLIKEA

SEQ ID NO: 2867 - protein, 331 aa, Glycine max
MASSTNALPPTGNGLIVSFGEMLIDFVPTVSGVSLAEAPGFLKAPGGAPANVAIAVARLGGKAAFVGKLGDDEFGHMLAGILKENDVRSDGINFDQGARTALAFVTLRADGEREFMFYRNPSADMLLTPEDLNLELIRSAKVFHYGSISLIVEPCRSAHLKAMEVAREAGCLLSYDPNLRLPLWPSAEEARQQILSIWDKADVIKVSDVELEFLTGSDKIDDASALSLWHPNLKLLLVTLGEHGSRYYTKNFHGSVEAFHVSTVDTTGAGDSFVGALLSKIVDDQSVLEDEARLREVLKFANACGAITTTKKGAIPALPTEADALNLIKEA

SEQ ID NO: 2868 - protein, 329 aa, Trifolium pratense
MASSNDIPTTGTGLIVSFGEMLIDFVPTASGVSLAEAPGFLKAPGGAPANVAIAITRLGGKSAFVGKLGDDEFGHMLAGILKENGVKAEGITFDEGARTALAFVTLRADGEREFMFYRNPSADMLLKPEELNLELIRSAKVFHYGSISLIVEPCRSAHLKALEVAKEAGCLLSYDPNLRLPLWPSADEARKQILSIWEKADLIKVSDNELEFLTGSDKIDDATALTLWHPNLKLLLVTLGEHGARYYTKNFHGTVEAFHVNTVDTTGAGDSFVGALLAKIVDDQSILEDEPRLRAVLKFANACGAITTTKKGAIPALPNEEDALKLLNA

SEQ ID NO: 2869 - protein, 329 aa, Trifolium pratense
MASSNDIPTTGTGLIVSFGEMLIDFVPTASGVSLAEAPGFLKAPGGAPANVAIAITRLGGKSAFVGKLGDDEFGHMLAGILKENGVKDEGITFDEGARTALAFVTLRADGEREFMFYRNPSADMLLKPEELNLELIRSAKVFHYGSISLIVEPCRSAHLKALEVAKEAGCLLSYDPNLRLPLWPSADEARKQILSIWEKADLIKVSDNELEFLTGSDKIDDATALTLWHPNLKLLLVTLGEHGARYYTKNFHGTVEAFHVNTVDTTGAGDSFVGALLAKIVDDQSILEDEPRLRAVLKFANACGAITTTKKGAIPALPNEEDALKLLNA

SEQ ID NO: 2870 - protein, 329 aa, Trifolium pratense
MASSNDIPTTGKGLIVSFGEMLIDFVPTASGVSLAEAPGFLKAPGGAPANVAIAITRLGGNSAFVGKLGDDEFGHMLAGILKENGVKDEGITFDEGARTALAFVTLRADGEREFMFYRNPSADMLLKPEELNLELIRSAKVFHYGSISLIVEPCRSAHLKALEVAKEAGCLLSYDPNLRLPLWPSADEARKQILSIWEKADLIKVSDNELEFLTGSDKIDDETALTLWHPNLKLLLVTLGEHGARYYTKNFHGTVEAFHVNTVDTTGAGDSFVGALLAKIVDDQSILEDEPRLRAVLKFANACGAITTTKKGAIPALPKEEDALNLLNA

SEQ ID NO: 2871 - protein, 326 aa, Cajanus cajan
MALPPTGAGLIVSFGEMLIDFVPTVSGVSLAEAPGFLKAPGGAPANVAIAVARLGGKAAFIGKLGDDEFGQMLAGILQENNVKADGIKFDEGARTALAFVTLRADGEREFMFYRNPSADMLLTPEDLNLELIRSAKVFHYGSISLIVEPCRSAHLKAMEVAKEAGCLLSYDPNLRLPLWPSAEEARQQILSIWDKADVIKVSDVELEFLTGSDRIDDASALSLWHPNLKLLLVTLGEHGSRYYTKNFHGSVEAFHVNTVDTTGAGDSYVGALLSKIVDDQSILEDEPRLREVLKFANACGAITTTKKGAIPALPTEADALNLINEA

SEQ ID NO: 2872 - protein, 329 aa, Prunus persica
MANNGVPATGKGLIVSFGEMLIDFVPTESGVSLAEAPGFLKAPGGAPANVAIAVARLGGKAAFVGKLGDDEFGHMLAGILKQYGVTGEGILFDQGARTALAFVTLRADGEREFMFYRNPSADMLLKPDELNLELIKSAKVFHYGSISLIVEPCRSAHLKAMEVAKDAGALLSYDPNLRLPLWPSAEEARKQIMSIWEKADLIKISDVELEFLTGNPKIDDENALTLWKDNLKLLLVTLGENGCRYYTKHFRGSVEAFHVKTVDTTGAGDSFVGALLAKIVDDQSILEDEQRLRGVLKFANACGAITTTKKGAIPALPSESEAFTLIKGA

SEQ ID NO: 2873 - protein, 331 aa, Humulus lupulus
MASSNNGVPATGKGLIVSFGEMLIDFVPTVSGVSLAEAPGFLKAPGGAPANVAIAVTRLGGKAAFVGKLGDDEFGHMLAGILKENGVSAEGINFDQGARTALAFVTLKADGEREFMFYRNPSADMLLKPEELNLELIKSAKVFHYGSISLIVEPCRSAHMKAMEAAKEAGALLSYDPNLRLPLWPSEDEAREQILSIWDKADVIKVSDVELEFLTKSNKIDDASAMSLWHPNLKLLLVTLGEHGCRYYTKNFHGSVDAFHVKAVDTTGAGDSFVGALLTKIVDDQSIIEDEARLKQVLKFANACGAITTTKKGAIPALPTETEVLSLVKGV

SEQ ID NO: 2874 - protein, 329 aa, Citrus clementina
MATNGAVSSSSSLIVSFGEMLIDFVPTVSGVSLAEAPGFLKAPGGAPANVAIAVARLGGKAAFVGKLGDDEFGHMLAGILKENGVSADGINFDQGARTALAFVTLRADGEREFMFYRNPSADMLLRPDELNLELIRSAKVFHYGSISLIVEPCRSAHLEAMKAAKEAGALLSYDPNLRLPLWPSPEEAREQIMSIWDKAEVIKVSDVELEFLTGSDKIDDESALSLWHPNLKLLLVTLGEHGCRYYTKSFKGAVDAFHVNTVDTTGAGDAFVGALLGKLVDDQSVLEDETRLREILKFANACGAITTTKKGAIPALPTESEALNLLKGA

SEQ ID NO: 2875 - protein, 331 aa, Castanea mollissima
MAPNGVVEKTGAGLIVSFGEMLIDFVPTVSGVSLAEAPGFLKAPGGAPANVAIAVSRLGGKSAFVGKLGDDEFGHMLAGILRENGVVDEGINFDKGARTALAFVTLRADGEREFMFYRNPSADMLLTPDELNLDLIRSAKVFHYGSISLIVEPCRTAHLKAMEVAKDAGLLLSYDPNLRLPLWPSPEEAREQIKSIWDKADLIKVSDVELEFLTGSNKIDDESAMTLWHPNLKLLLVTLGDLGCRYYTKNFHGEVEAFRVNTVDTTGAGDSFVGALLCKIVDDQSILEDEPRLRAVLKFANACGAITTTKKGAIPALPTESDALSLIKGGA

SEQ ID NO: 2876 - protein, 327 aa, Nicotiana benthamiana
MAANGVSSGLIVSFGEMLIDFVPTVSGVSLAEAPGFLKAPGGAPANVAIAVTRLGGKSAFVGKLGDDEFGHMLAGILKQNGVQADGINFDKGARTALAFVTLRADGEREFMFYRNPSADMLLTPGELNLDVIRSAKVFHYGSISLIVEPCRSAHLKAMEVAKEAGALLSYDPNLRLPLWPSAEEARKQIKSIWDKADVIKVSDVELEFLTGSDKIDDESAMSLWHPNLKLLLVTLGEKGCNYYTKNFHGGVEAFHVKTVDTTGAGDSFVGALLTKIVDDQSILEDEARLKEVLRFACACGAITTTKKGAIPALPTESEALTLLKGGA

SEQ ID NO: 2877 - protein, 329 aa, Tabernaemontana elegans
MASLANGGDSSLIVSFGEMLIDFVPTVSGVSLAEAPGFLKAPGGAPANVAIAVSRLGGKASFVGKLGDDEFGHMLAGILKQNGVSAEGITFDTGARTALAFVTLRADGEREFMFYRNPSADMLLTPDELNLELIRSAKVFHYGSISLIVEPCRSAHLKAMEVAKDAGALLSYDPNLRLPLWPSAEQAREQIKSIWDKADIIKVSDVELEFLTGSDKIDDESALSLWHPNLKLLLVTLGEKGCRYYSKSFCGSVDAFHVNTVDTTGAGDSFVGALLNKIVDDQAILEDEPRLREVLRFACACGAITTTKKGAIPALPTESEALALLNQGK

SEQ ID NO: 2878 - protein, 329 aa, Vinca minor
MASVANGDSSRLIVSFGEMLIDFVPTVSGVSLAEAPGFLKAPGGAPANVAIAVSRLGGKAAFVGKLGDDEFGHMLAGILKENGVGAEGINFDTGARTALAFVTLRADGEREFMFYRNPSADMLLTPDELNLELIRSAKVFHYGSISLIVEPCRSAHLKAMEAAKDAGALLSYDPNLRLPLWPSAEEAREQIKSIWDKADIIKVSDVELEFLTGSDKIDDESAMSLWHPNLKLLLVTLGEKGCRYYSKSFRGSVDAFHVNTVDTTGAGDSFVGALLAKIVDDQAILEDEPRLREVLRFSCACGAITTTKKGAIPALPTESEVLALLNKGN

SEQ ID NO: 2879 - protein, 329 aa, Amsonia hubrichtii
MAAVANGSSSGLIVSFGEMLIDFVPTVSGVSLAEAPGFLKAPGGAPANVAIAVSRLGGKAAFVGKLGDDEFGHMLAGILKQNGVSADGINFDTGARTALAFVTLRADGEREFMFYRNPSADMLLTPDELNLELIRSAKVFHYGSISLIVEPCRSAHLKAMEVAKDAGALLSYDPNLRLPLWPSAKEAREQIMSIWDKADIIKVSDVELEFLTGSDKIDDESALSLWHPNLKLLLVTLGEKGCKYYSKNFHGSVDAFHVNTVDTTGAGDSFVGALLNKIVDDQAILEDEPRLKEALRFACACGAITTTKKGAIPALPTESEALALINKGN

SEQ ID NO: 2880 - protein, 329 aa, Prunus mume
MTNNGVPATGKGLIVSFGEMLIDFVPTESGVSLAEAPGFLKAPGGAPANVAIAVARLGGKAAFVGKLGDDEFGHMLAGILKQYGVTGEGILFDQGARTALAFVTLRADGEREFMFYRNPSADMLLKPDELNFELIKSAKVFHYGSISLIVEPCRSAHLKAMEVAKDAGALLSYDPNLRLPLWPSAEEARKQIMSIWEKADVIKVSDVELEFLTGSPKIDDENALTLWKDNLKLLLVTLGENGCRYYTKHFRGSVEAFHVKAVDTTGAGDSFVGALLAKIVDDQSILEDEQRLRGVLKFANACGAITTTKKGAIPALPSESEAFTLIKEA

SEQ ID NO: 2881 - protein, 328 aa, Theobroma cacao
MAPIGVPSDKSLIVSFGEMLIDFVPTESGVSLAEAPGFLKAPGGAPANVAIAVARLGGKASFVGKLGDDEFGHMLADILKKNGVSEDGILFDQGARTALAFVTLRADGEREFMFYRNPSADMLLKPEELNLDLIRSSKVFHYGSISLIVEPCRSAHLKAMEVAKQSGALLSYDPNLRLPLWPSADEARKQILSIWDKADVIKVSDVELEFLTGSDKIDDETAMKLWHPNLTLLLVTLGEKGSRYYTKNFHGSVDAFHVNTVDTTGAGDSFVGALLCKIVEDPTILENESKLREVLKFANACGAITTTKKGAIPALPTEADALALIKGA

SEQ ID NO: 2882 - protein, 329 aa, Catharanthus roseus
MAAVANGGSSSLIVSFGEMLIDFVPTVSGVSLAEAPGFLKAPGGAPANVAIAVSRLGGKAAFVGKLGDDEFGHMLAGILKQNGVRADGINFDKGARTALAFVTLRADGEREFMFYRNPSADMLLTPDELNLELIRSAKVFHYGSISLIVEPCRSAHMKAMEAAKEAGALLSYDPNLRLPLWPSAEEAREQIMSIWDKADIIKVSDVELEFLTGSDKIDDESAMSLWHPNLKLLLVTLGEKGCNYYTKNFHGSVSAFHVNTVDTTGAGDSFVGALLNKIVDDQAILEDEPRLREVLRFACACGAITTTKKGAIPALPTEAEVLTLLNKGN

SEQ ID NO: 2883 - protein, 325 aa, Ipomoea nil
MAVNGGTCSNLIVSFGEMLIDFVPTVSGVSLAEAPGFLKAPGGAPANVAIAVTRLGGKAAFVGKLGDDEFGHMLAGILKENGVRADGINFDKGARTALAFVTLRADGEREFMFYRNPSADMLLTPDELNLELIRSAKVFHYGSISLIVEPCRSAHMKAMEAAKDAGALLSYDPNLRLPLWPSPEEAREQIMSIWDKADVIKVSDVELEFLTGCDKIDDESALSLWHPNLKLLLVTLGEKGCRYYTKSFKGSVEAFHVKTVDTTGAGDSFVGALLCKIVDDCSIIEDEARLKEVLRFACACGAITTTKKGAIPALPCEADALALLN

SEQ ID NO: 2884 - protein, 309 aa, Lupinus angustifolius
LIDFVPTVSGVSLAEAPGFLKAPGGAPANVAIAVARIGGKAAFVGKLGDDEFGHMLAGILKENGVRADGITFDTGARTALAFVTLRADGEREFMFYRNPSADMLLKPEELNLELIRSAKVFHYGSISLIVEPCRSAHLKAMEVAKEAGCLLSYDPNLRLPLWPSPEEARKQILSIWDKADLIKVSDVELEFLTGSDKIDDASALSLWHPNLKLLLVTVGEHGSKYYTKNFHGSVDAFHVKTIDTTGAGDSFVGSLLAKIVDDQSILEDEPRLREVLKFANACGAITTTKKGAIPALPTESDVLNLIKGA

SEQ ID NO: 2885 - protein, 347 aa, Glycine max
MASTNALPPTGNGLIVSFGEMLIDFVPTVSGVSLAEAPGFLKAPGGAPANVAIAVARLGGKAAFVGKLGDDEFGHMLAGILKENDVRSDGINFEKGARTALAFVTLRADGEREFMFYRNPSADMLLTPEDLNLELIRSAKVFHYGSISLIVEPCRSAHLKAMEVAREAGCLLSYDPNLRLPLWPSAEEARQQILSIWDKADVIKVSDVELEFLTGSDKIDDASALSLWHPNLKLLLVTLGEHGSRYYTKNFRGSVEAFHVNTVDTTGAGDSFVGALLSKIVDDQSILEDEARLREVLKFANACGAITTTKKGAIPALPTEADALKLIKEIKIKEHVREAGNRRCLIL

SEQ ID NO: 2886 - protein, 331 aa, Fagus grandifolia
MASNGVAVGETGTGLIVSFGEMLIDFVPTESGVSLAEAPGFLKAPGGAPANVAIAVTRLGGKAAFVGKLGDDEFGHMLAGILRQYGVVDKGINFDKGARTALAFVTLRADGDREFMFYRNPSADMLLTPDELNLDLIRSAKVFHYGSISLIVEPCRSAHLKAMEVAKDAGVLLSYDPNLRLPLWPSAEEAREQILSIWDKADLIKVSDVELEFLTGSDKIDDASAMTLWHPNLKLLLVTLGENGCRYYTKNFHGGVEAFRVNTVDTTGAGDSFIGALLCKIVDDQSILEDEQRLRGVLKFANACGAITTTKKGAIPALPTESEALALLKGA

SEQ ID NO: 2887 - protein, 331 aa, Eucalyptus grandis
MASRNNGISGGKGLIVSFGEMLIDFVPTVSGVSLAEAPGFLKAPGGAPANVAIAVTRLGGRSAFVGKLGDDEFGHMLAGILKENGVNCDGINFDQGARTALAFVTLRADGEREFMFYRNPSADMLLKPEELNLELIRSAKVFHYGSISLIVEPCRSAHLEAMQVAKDAGALLSYDPNLRLPLWPSPEEAREQIKSIWDKADIIKVSDVELEFLTGSDKIDDENAMTLWHPNLTLLLVTLGEHGCRYYTKHFHGHVEAFHVNTVDTTGAGDSFVGALLCNIVDDRSILEDEGKLRKVLKFANACGAITTTKKGAIPALPTEADVLSLIDGTK

SEQ ID NO: 2888 - protein, 328 aa, Capsicum annuum
MAVNGSASSGLIVSFGEMLIDFVPTVSGVSLAEAPGFLKAPGGAPANVAIAVTRLGGKSAFVGKLGDDEFGHMLAGILKQNGVQADGINFDTGARTALAFVTLRADGEREFMFYRNPSADMLLKPEELNLDLIRSAKVFHYGSISLIVEPCRSAHLKAMEVAKEAGALLSYDPNLRLPLWPSAEEAKKQIKSIWDKADVIKVSDVELEFLTGNPKIDDESAMSLWHPNLKLLLVTLGEKGCNYYTKNFRGSVGAFHVKTIDTTGAGDSFVGALLTKIVDDQAIIQDEARLKEVLRFACACGAITTTKKGAIPALPTEADALTLIKGGA

SEQ ID NO: 2889 - protein, 328 aa, Petunia hybrida
MAVNGASSGGLIVSFGEMLIDFVPTVSGVSLAEAPGFLKAPGGAPANVAIAVTRLGGNSAFVGKLGDDEFGHMLAGILKENGVKAEGINFDTGARTALAFVTLRADGEREFMFYRNPSADMLLTPDELNLDVIRSAKIFHYGSISLIVEPCRSAHLKAMEVAKEAGALLSYDPNLRLPLWPSAEEARKQIKSIWDKADVIKVSDNELEFLTGSDKIDDESAMSLWHPNLKLLLVTLGEKGCRYYTKNFHGGVEGFHVKTVDTTGAGDSFVGALLKKIVDDQSILEDEARLKEVLTFACACGAITTTKKGAIPALPTESEALTLLKRGA

SEQ ID NO: 2890 - protein, 327 aa, Nicotiana tabacum
MGANGVSSGLIVSFGEMLIDFVPTVSGVSLAEAPGFLKAPGGAPANVAIAVTRLGGKSAFVGKLGDDEFGHMLAGILKQNGVQADGINFDKGARTALAFVTLRADGEREFMFYRNPSADMLLTPDELNLEVIRSAKVFHYGSISLIVEPCRSAHLKAMEVAKEAGALLSYDPNLRLPLWPSAEEARKQIKSIWDKADVIKVSDVELEFLTGSDKIDDESAMSLWHPNLKLLLVTLGDKGCNYYTKNFHGGVEAFHVKTVDTTGAGDSFVGALLTKIVDDQSILEDEARLKEVLRFACACGAITTTKKGAIPALPTESEALTLLKGGA

SEQ ID NO: 2891 - protein, 330 aa, Ricinus communis
MASVTNGKSSSSLIVSFGEMLIDFVPTVSGVSLAEAPGFLKAPGGAPANMAIAVARLGGNAAFVGKLGDDEFGHMLAGILKENGVGSDGINFDKGARTALAFVTLRADGEREFMFYRNPSADMLLTPEELNLEVIRSAKIFHYGSISLIVEPCRSAHLKAMEEAKNAGALLSYDPNLRLPLWPSAEYAREQIMSIWDKADIIKVSDVELEFLTGSDKIDDESALSLWHPNLKLLLVTLGENGCRYYTKNFHGSVDAFHVKTVDTTGAGDSFVGALLCKIVDDLSVLEEEPRLREVLRFANACGAITTTKKGAIPALPTEADVLSLMKASS

SEQ ID NO: 2892 - protein, 330 aa, Vitis vinifera
MAPVIGVNGGAGGLILSFGEMLIDFVPTVSGVSLAEAPGFLKAPGGAPANVAIAVTRLGGRSAFVGKLGDDEFGHMLAGILKENGVRGDGITFDVGARTALAFVTLRADGEREFMFYRNPSADMLLKPEELNLELIRSAKVFHYGSISLIVEPCRSAHLRAMEVAKEAGALLSYDPNLRLPLWPSAEEAREQIMSIWEKAEVIKVSDVELEFLTGSDKVDDETALSLWHPGLKLFLVTLGEKGCRYYTKNFHGAVEGFHVKTVDTTGAGDSFVGALLCKIVDDQSVLEDEARLREVLKFANACGAITTTKKGAIPALPAEADVLSLLHGA

SEQ ID NO: 2893 - protein, 328 aa, Populus trichocarpa
MASNGVNDKSLIVSFGEMLIDFVPTVSGVSLAEAPGFVKAPGGAPANVAIAVARLGGKAAFVGKLGDDEFGNMLAGILKENGVIATGINFDTGARTALAFVTLRADGEREFMFYRNPSADMLLRPEELNLELIRSAKVFHYGSISLIVEPCRSAHLQAMRVAKDAGALLSYDPNLRLPLWPSAEEAREQILSIWDEADVVKVSDNELEFLTGSDKIDDETAMSLWRPNFKLLLVTLGEKGCNYYTKNFHGSVEAFHVDTVDTTGAGDSFVGALLCKIVDDQSVLEDEPRLREILRFANACGAITTTKKGAIPALPTPADALKLVKEGK

SEQ ID NO: 2894 - protein, 323 aa, Rosa hybrid cultivar
MANDKGLIVSFGEMLIDFVPTASGVSLAEAPGFLKAPGGAPANVAIAVARLGGHASFVGKLGDDEFGHMLAGILKENGVTGDGILFDQGARTALAFVTLRADGEREFMFYRNPSADMLLKPEELNFELIRSAKVFHYGSISLIVEPCRSAHLKAMEVAKDAGALLSYDPNLRLPLWPSPKEAREQILSIWEKAEVIKVSDVELEFLTGNDSIDDENALTLWHSNLKLLLVTLGENGCKYYTKNFRGSVEAFHVTAVDTTGAGDAFVGALLTKIVDDQSILEDEPRLREVLKFANACGAITTTKKGAIPALPTESDALALIKGA

SEQ ID NO: 2895 - protein, 323 aa, Fragaria vesca
MANDKGLIVSFGEMLIDFVPTASGVSLAEAPGFLKAPGGAPANVAIAVARLGGHAAFIGKLGDDEFGHMLAGILKENDVSGEGILFDQGARTALAFVTLRADGEREFMFYRNPSADMLLKPEELNFELIRSAKVFHYGSISLIVEPCRSAHLKAMEVAKEAGALLSYDPNLRLPLWPSPEEACEQIMSIWEKADVIKVSDVELEFLTGNPKIDDENALTLWHSNLKLLLVTLGEHGCRYYTKNFRGCVEAFHVTAVDTTGAGDSFVGALLVKIVDDQSILDDEPRLREVLKFANACGAITTTKKGAIPALPNESEALALIKGA

SEQ ID NO: 2896 - protein, 320 aa, Vinca minor
SSLIVSFGEMLIDFVPTVSGVSLAEAPGFLKAPGGAPANVAIAVSRLGGKASFVGKLGDDEFGHMLAGILKENGVGADGINFDTGARTALAFVTLRADGEREFMFYRNPSADMLLTPDELNLELIRSAKVFHYGSISLIVEPCRSAHLKAMEAAKDAGALLSYDPNLRLPLWPSAEEAREQIKSIWDKADIIKVSDVELEFLTGSDKIDDESAMSLWHPNLKLLLVTLGEKGCRYYSKGFRGSIDGFHVNTVDTTGAGDSFVGALLAKIVDDQGILEDESRLREVLRFSCACGAITTTKKGAIPALPTESEVLSLLNKGN

SEQ ID NO: 2897 - protein, 328 aa, Gossypium hirsutum
  Sequence also found in Organisms: Gossypium raimondii
MAPNGVVSDKSSIVSFGEMLIDFVPTVSGVSLAEAPGFLKAPGGAPANVAIAVSRLGSKASFIGKLGDDEFGHMLADILKQNGVSGDGILFDQGARTALAFVTLRADGEREFMFYRNPSADMLLTPEELNLDLIRSAKVFHYGSISLIVEPCRSAHLKAMEVAKESGALLSYDPNLRLPLWPSADEARKQILSIWDKADIIKVSDVELEFLTGSNKIDDETAMKLWRPNLTLLLITLGEKGSMYYTKYFHGSVDAFHVNTVDTTGAGDSFVGALLCKIVEDPTILENESKLREVLKFANACGAITTTKKGAIPALPTEAEVLALINGA

SEQ ID NO: 2898 - protein, 331 aa, Linum usitatissimum
MAFSNGGSGSSSLIVSFGEMLIDFVPTVSGVSLAEAPGFIKAPGGAPANVAIAVARLGGKAAFVGKLGDDEFGRMLAGILKENAVIVDGINFDKGARTALAFVTLKADGDREFMFYRNPSADMLLQPEELNLELIRSAKVFHYGSISLIVEPCRSAHMKAMEAAKDAGALLSYDPNLRLPLWPSPEEAREQILSIWDKAEIIKVSDVELEFLTGSDKIDDASAMSLWHDNLKLLLVTLGEKGCRYYTKSFHGSVDAFQVNTVDTTGAGDSFVGALLTKIVDDQSVLQEEARLREVLKFANACGAITTTKKGAIPALPTEADSLALIKSSSQ

SEQ ID NO: 2899 - protein, 328 aa, Gossypium hirsutum
MAANGVVSDKSLIVSFGEMLIDFVPTVSGVSLAEAPGFLKAPGGAPANVAIAVARLGGKASFVGKLGDDEFGHMLADILKQNGVSGDGILFDQGARTALAFVTLRADGEREFMFYRNPSADMLLKPEELNLDLIRSSKVFHYGSISLIVEPCRSAHLKAMEVAKGAGALLSYDPNLRLPLWPSADEARKQILSIWDKADIVKVSDVELEFLTGSNKVDDETAMKLWRPNFTLLLVTLGEKGSRYYTKNFRGAVDAFHVNTVDTTGAGDSFVGALLCKIVENPTILEDEAKLREVLKFANACGAITTTKKGAIPALPTEADALALINGA

SEQ ID NO: 2900 - protein, 323 aa, Lupinus angustifolius
MASTTGNGLIVSFGEMLIDFVPTTSGVSLAEAPGFLKAPGGAPANVAIAVARLGGKAAFVGKLGDDEFGHMLAGILKENNVNADGITFDQGARTALAFVTLRADGEREFMFYRNPSADMLLTPQDLNLQLIRSAKIFHYGSISLIVEPSRSAHLKALEVAKEAGSLLSYDPNLRLPLWPSPEEAREQILSIWDKADIIKISDVELEFLTGKVDDASALSLWHPNLKLLLVTLGEDGSKYYTKNFNGSVDAFHVNTVDTTGAGDSFIGALLSKIVDDQTILEDEPRLREVLKFANATGAITTTKKGAIPALPTEPDVLNLIQKA

SEQ ID NO: 2901 - protein, 329 aa, Solanum phureja
  Sequence also found in Organisms: Solanum tuberosum
MAVNGSAPSSGLIVSFGEMLIDFVPTVSGVSLAEAPGFLKAPGGAPANVAIAVTRLGGKSAFVGKLGDDEFGHMLAGILKTNGVQADGINFDKGARTALAFVTLRADGEREFMFYRNPSADMLLTPDELNLDLIRSAKVFHYGSISLIVEPCRSAHLKAMEVAKEAGALLSYDPNLRLPLWSSEEEARKQIKSIWNYADVIKVSDVELEFLTGSNKIDDECAMSLWHPNLKLLLVTLGEKGCNYYTKKFHGSVGGFHVKTVDTTGAGDSFVGALLTKIVDDQAILEDEARLKEVLRFSCACGAITTTKKGAIPALPTVSEVLTLLKGGA

SEQ ID NO: 2902 - protein, 331 aa, Manihot esculenta
MASAVSNGSSGSSLIVSFGEMLIDFVPTVSGVSLAEAPGFLKAPGGAPANVAIAVARLGGKSAFVGKLGDDEFGHMLAGILKENGVIGNGINFDKGARTALAFVTLRADGEREFMFYRNPSADMLLKPEELNLELIRSAKVFHYGSISLIVEPCRSAHLKAIETAKDAGALLSYDPNLRLPLWPSAAEAREQIMSIWDKAEVIKVSDVELEFLTGSDKIDDADALSLWHPNLKLLLVTLGEKGCRYYTKNFHGSVEAFNVKTVDTTGAGDSFIGALLCKIVDDRSIIEDEARLRDVLKFANACGAITTTKKGAIPALPTEQEVLALINGSK

SEQ ID NO: 2903 - protein, 331 aa, Cannabis sativa
MASSNNGVSENGKGLIVSFGEMLIDFVPTVSGVSLAEAPGFLKAPGGAPANVAIAVTRLGGKAAFVGKLGDDEFGHMLAGILRDNGVSTQGINFDQGARTALAFVTLKADGEREFMFYRNPSADMLLRPDELNLELIKSAKVFHYGSISLIVEPCRSAHMKAMEAAKDAGALLSYDPNLRLPLWPSEDEAREQILSIWDKADVIKVSDVELVFLTKNDKIDDASAMSLWHPNLKLLLVTLGENGCRYYTKNFHGSVDAFHVKAVDTTGAGDSFVGALLTKIVDDQSIIEDEARLKEVLTFANACGAITTTKKGAIPALPTETEVLSLVRGA

SEQ ID NO: 2904 - protein, 328 aa, Gossypium raimondii
MAANGVVSDKSLIVSFGEMLIDFVPTVSGVSLAEAPGFLKAPGGAPANVAIAVARLGGKASFVGKLGDDEFGHMLADILKQNGVSGDGILFDQGARTALAFVTLRADGEREFMFYRNPSADMLLKPEELNVDLIRSSKVFHYGSISLIVEPCRSAHLKAMEVAKGAGALLSYDPNLRLPLWPSADEARKQILSIWDKADIVKVSDVELEFLTGSNKVDDETAMKLWRPNFTLLLVTLGEKGSRYYTKNFRGAVDAFHVNTVDTTGAGDSFVGALLCKIVENPTILEDEAKLREVLKFANACGAITTTKKGAIPALPTEADALALINGA

SEQ ID NO: 2905 - protein, 329 aa, Actinidia deliciosa
MAMKNGGVPSGGLIVSFGEMLIDFVPTVSGVSLAEAPGFLKAPGGAPANVAIAITRLGGRSAFVGKLGDDEFGQMLAGILRQNGVADDGILFDTGARTALAFVTLRADGEREFMFYRNPSADMLLTPDELNLDLIRSAKIFHYGSISLIVEPCRSAHLKAMEVAKDAGALLSYDPNLRLPLWPSAEEAREQIMSIWDKAEVIKVSDNELEFLTGSDKIDDESAMSLWHPNLKLLLVTLGEKGCRYYTKSFHGSVDAFHVKTVDTTGAGDAFIGALLCKMVDDRSVIEDEARLREILKFANACGAITTTKKGAIPALPTESDVLSLVKGE

SEQ ID NO: 2906 - protein, 328 aa, Solanum lycopersicum
MAVNGASSSGLIVSFGEMLIDFVPTVSGVSLAEAPGFLKAPGGAPANVAIAVTRLGGKSAFVGKLGDDEFGHMLAGILKTNGVQAEGINFDKGARTALAFVTLRADGEREFMFYRNPSADMLLTPAELNLDLIRSAKVFHYGSISLIVEPCRAAHMKAMEVAKEAGALLSYDPNLRLPLWPSAEEAKKQIKSIWDSADVIKVSDVELEFLTGSNKIDDESAMSLWHPNLKLLLVTLGEKGCNYYTKKFHGTVGGFHVKTVDTTGAGDSFVGALLTKIVDDQTILEDEARLKEVLRFSCACGAITTTKKGAIPALPTASEALTLLKGGA

SEQ ID NO: 2907 - protein, 328 aa, Utricularia gibba
MAAAAGTGSGGLIVSFGEMLIDFVPTVSGVSLAEAPGFLKAPGGAPANVAIAVARLGGKAAFVGKLGDDEFGHMLVGILKKNGVSAEGVNFDSGARTALAFVTLRSDGEREFMFYRNPSADMLLTPEELNLDLIRSAKVFHYGSISLIVEPCRSAHLKAMEVAKEAGALLSYDPNLRLPLWPSADYAREQILSIWDKADVIKVSDVELEFLTGSNKIDDESAMTLWHPNLKLLLVTLGENGCRYYTQSFHGSVDAFQVKTVDTTGAGDSFVGALLCKIVDDHSIIENETRLKEVLKFACACGAITTTQKGAIPALPTPDKVLDLLNDS

SEQ ID NO: 2908 - protein, 327 aa, Tripterygium wilfordii
AVHNGESTGPLIVSFGEMLIDFVPTVSGVSLAEAPGFLKAPGGAPANVAIAVARLGGHAAFVGKLGDDEFGHMLAGILGENGVSTKGINFDLGARTALAFVTLRADGEREFMFYRNPSADMLLTPEELNLELIRSAKVFHYGSISLIVEPCRSAHLKAMEAAKEAGALLSYDPNLRLPLWPSPAEAREQIMSIWDKAEVIKVSDNELEFLTGSDKIDDAAALSLWHPNLKLLLVTLGEKGCRYYTKNFHGQVDAFNVKAVDTTGAGDAFVGALLSKIVDDQSVIEDEPRLREVLKFSNACGAITTIKKGAIPALPTTSEVLTFVKGA

SEQ ID NO: 2909 - protein, 331 aa, Linum usitatissimum
MASNGGSTDSSLIVSFGEMLIDFVPTVSGVSLAEAPGFLKAPGGAPANVAIAVSRLGGKSAFVGKLGDDEFGHMLAGILKENGVICDGINFDKGARTALAFVTLKADGDREFMFFRNPSADMLLQPEELNLELIRSAKVFHYGSISLIVEPCRSAHLKAMEAAKDAGALLSYDPNLRLPLWPSPEEAREQILSIWDKAEIIKVSDVELEFLTGSDKIDDASAMSLWHDNLKLLLVTLGEKGCNYYTKGFNGTVEAFHVNAVDTTGAGDSFVGALLTKIVDDRSILEDEARLKEALRFANACGAITTTKKGAIPALPTEADVLSFIKSSFAH

SEQ ID NO: 2910 - protein, 331 aa, Linum usitatissimum
MASNGGSTDSSLIVSFGEMLIDFVPTVSGVSLAEAPGFLKAPGGAPANVAIAVSRLGGKSAFVGKLGDDEFGHMLAGILKENGVIGDGINFDKGARTALAFVTLKADGDREFMFFRNPSADMLLQPEELNLELIRSAKVFHYGSISLIVEPCRSAHMKAMEAAKDAGALLSYDPNLRLPLWPSPEEAREQILSIWDKAEIIKVSDVELEFLTGSDKIDDASAMSLWHDNLKLLLVTLGEKGCNYYTKGFHGTVKAFHVNAVDTTGAGDSFVGALLTKIVDDRSILEDEARLKEALRFANACGAITTTKKGAIPALPTEADVLSFIKSSSDH

SEQ ID NO: 2911 - protein, 328 aa, Gossypium hirsutum
MAANGVVSDKSLIVSFGEMLIDFVPTVSGVSLAEAPGFLKAPGGAPANVAIAVARLGGKASFVGKLGDDEFGHMLADILKQNSVSGDGILFDQGARTALAFVTLRADGEREFMFYRNPSADMLLKPEELNVDLIRSSKVFHYGSISLIVEPCRSAHLKAMEVAKGAGALLSYDPNLRLPLWPSADEARKQILSIWDKADIVKVSDVELEFLTGSNKVDDETAMKLWRPNFTLLLVTLGEKGSRYYTKNFRGAVDAFHVNTVDTTGAGDSFVGALLCKIVENPTILEDEAKLREVLKFANACGAITTTKKGAIPALPTVADALALINGA

SEQ ID NO: 2912 - protein, 323 aa, Cyclamen graecum
MASNSGLIVSFGEMLIDFVPTVSGVSLAEAPGFLKAPGGAPANVAIAVARLGGRAAFMGKLGDDEFGHMLAGILKENGVSGDGILFDQGARTALAFVTLRADGEREFMFYRNPSADMLLTPEELNLEQIRSAKIFHYGSISLIVEPCRSAHIKAMEEAKAAGALLSYDPNLRLPLWPSAENAREQILSIWDKAEIIKVSDVELEFLTGSDKIDDEDAQSLMHPKLKLLLVTLGEKGCRYYTKNFHGAVDAFHVNAIDTTGAGDSFVGALLCKIVDDQKILEDESRLRDVLKFANACGAITTTKKGAIPALPTEVDVLNLMKGN

SEQ ID NO: 2913 - protein, 326 aa, Brassica oleracea
MAASNGEKSLIVSFGEMLIDFVPTVSGVSLAEAPGFIKAPGGAPANVAIAVSRLGGRAAFVGKLGDDEFGHMLAGILKQNGVSAEGINFDTGARTALAFVTLRSDGEREFMFYRNPSADMLLRPDELNLDLIKSAKVFHYGSISLIVEPCRSAHLKAMEVAKEAGALLSYDPNLRLPLWPSKEEAKKQILSIWDKAEVIKVSDEELMFLTGSDNVDDETALSLWHDNLKLLLVTLGEKGCKYYTKSFRGSVDPFHVNTVDTTGAGDSFVGALLCNIVDDRSVLEDEARLREVLRFANACGAITTTKKGAIPALPTVSEVQTLLNGN

SEQ ID NO: 2914 - protein, 328 aa, Lippia dulcis
MAANGSSIDGLIVSFGEMLIDFVPTVSGVSLADAPGFLKAPGGAPANVAIAVARLGGKAAFLGKLGDDEFGHMLAGILKKNGVSADGVNFDTGARTALAFVTLRADGEREFMFYRNPSADMLLTPDELNLELIRSAKVFHYGSISLIVEPCRSAHLKAMEVAKDAGALLSYDPNLRLPLWPSAEYAKEQIMSIWDKADVIKVSDVELEFLTGSDKIDDESAMSLWHDNLKLLLVTLGEKGCRYYTKHFRGAVDAFHVTAVDTTGAGDSFVGALLGKIVDDHVIFEDEGRLKEVLKYACACGAITTTKKGAIPALPTHAEVQSLIDGSH

SEQ ID NO: 2915 - protein, 326 aa, Eutrema halophilum
MATSNGEKSLIVSFGEMLIDFVPTVSGVSLAEAPGFIKAPGGAPANVAIAISRLGGRSAFVGKLGDDEFGHMLAGILKQNGVSAEGINFDTGARTALAFVTLRADGEREFMFYRNPSADMLLRPDELNLDLIRSAKVFHYGSISLIVEPCRSAHLKAMEVAKEAGALLSYDPNLRLPLWPSKEEAKKQILSIWDKAEVIKVSDEELMFLTGSDKVDDETALSLWHSNLKLLLVTLGEKGCRYYTKGFRGSVDPFRVNTVDTTGAGDSYVGALLCNIVDDRAVLEDEARLREVLRFANACGAITTTKKGAIPALPTESEVQGLLKGN

SEQ ID NO: 2916 - protein, 325 aa, Arabidopsis lyrata
MASNGDKGLIVSFGEMLIDFVPTESGVSLAEAPGFLKAPGGAPANVAIAVSRLGGRSAFVGKLGDDEFGHMLAGILRKNGVDDQGINFDTGARTALAFVTLRADGDREFMFYRNPSADMLLRPDELNLDLIRSAKVFHYGSISLIVEPCRSAHLKAMEVAKEAGALLSYDPNLREPLWPSKEEAKTQIMSIWDKAEIIKVSDVELEFLTGSNKIDDETALSLWHPNLKLLLVTLGEKGCRYYTKTFKGSVDPFHVNAVDTTGAGDSFVGALLNQIVDDQSVLEDEERLRKVLRFANACGAITTTKKGAIPALPSDAEVRSFLEKK

SEQ ID NO: 2917 - protein, 326 aa, Arabidopsis thaliana
MAASNGEKSLIVSFGEMLIDFVPTVSGVSLADAPGFIKAPGGAPANVAIAISRLGGRAAFVGKLGDDEFGHMLAGILKQNGVSAEGINFDTGARTALAFVTLRSDGEREFMFYRNPSADMLLRPDELNLDVIRSAKVFHYGSISLIVEPCRSAHLKAMEVAKEAGALLSYDPNLRLPLWPSKEEAQKQILSIWDKAEVIKVSDEELMFLTGSDKVDDETALSLWHSNLKLLLVTLGEKGCSYYTKSFRGSVDPFHVDAVDTTGAGDSFVGALLCKIVDDRAVLEDEARLREVLRFANACGAITTTKKGAIPALPTESEVQSLLKGN

SEQ ID NO: 2918 - protein, 327 aa, Olea europaea
MASNGSSDGLIVSFGEMLIDFVPTVSGVSLAEAPGFLKAPGGAPANVAIAVARLGGKAAFIGKLGEDEFGHMLAGILKENGVSADGIPFDKGARTALAFVTLRADGDREFMFYRNPSADMLLTPDELNLELIRSAKVFHYGSISLIVEPCRSAHLKAMEVAKDAGALLSYDPNLRLPLWPSADEARTQIMNIWDKADVIKISDVELEFLTGNNKIDDASAMSLWHDNLKLLLVTLGENGCRYYTKNFHGSVDAFHVKAVDTTGAGDSFVGALLCKIVNDHDIIQDELRLKEVLKFACACGAITTTKKGAIPALPTEKEVLALLKEGK

SEQ ID NO: 2919 - protein, 331 aa, Echinacea purpurea
MAATNGAINNDQSLIVSFGEMLIDFVPTVSGVSLAEAPGFLKAPGGAPANVAIAVARLGGKSAFVGKLGDDEFGHMLAGILKENGVSGDGINFDKGARTALAFVTLKADGEREFMFYRNPSADMLLTPDELNLELIRSAKVFHYGSISLIVEPCRSAHLKAMEVAKEAGALLSYDPNLRLPLWPSAEEAREQIMSIWDKAEVIKVSDNELEFLTGSDKIDDESAMSLWHPNLKLLLVTLGDKGCNYYTKHFHGTVGAFHVKAVDTTGAGDSFVGALLTKIVDDQSVLEDEARLKEILRYACACGAITTTKKGAIPALPTVPELDAFLKAHH

SEQ ID NO: 2920 - protein, 326 aa, Arabidopsis lyrata
MAASNGEKSLIVSFGEMLIDFVPTVSGVSLADAPGFIKAPGGAPANVAIAISRLGGRAAFVGKLGDDEFGHMLAGILKQNGVSAEGINFDTGARTALAFVTLKSDGEREFMFYRNPSADMLLRPDELNLDLIRSAKVFHYGSISLIVEPCRSAHLKAMEVAKEAGALLSYDPNLRLPLWPSKEEAQKQILSIWDKAEVIKVSDEELMFLTGSDKVDDETALSLWHSNLKLLLVTLGDKGCRYYTKSFRGSVDPFHVNAVDTTGAGDSYVGALLCKIVDDRAVLEDEARLREVLRYANACGAITTTKKGAIPALPTESEVQSLLKGN

SEQ ID NO: 2921 - protein, 329 aa, Sesamum indicum
MAASNGASSNGLIVSFGEMLIDFVPTVSGVSLAEAPGFLKAPGGAPANVAIAVARLGGKAAFVGKLGDDEFGHMLAGILKENGVSADGVNFDKGARTALAFVTLRADGEREFMFYRNPSADMLLTPDELNLELIRSAKVFHYGSISLIVEPCRSAHLKAMEVAKSAGALLSYDPNLRLPLWPSAEYAKEQIKSIWNKADVIKVSDEELVFLTGSDKVDDESAMSLWHDNLKLLLVTLGAKGCRYYTKNFRGAVEGFAVKTVDTTGAGDSFVGALLGKIVDDHSIIQDETRLKEALKYACACGAITTTKKGAIPALPAHSEVLSVLNGPK

SEQ ID NO: 2922 - protein, 331 aa, Citrullus lanatus
MAPNNGALPTGSGLIVSFGEMLIDFVPTVSGVSLAEAPGFLKAPGGAPANVAIAVSRLGGRAAFVGKLGEDEFGRMLEGIVKENGVDASGIRFDQGARTALAFVTLRADGEREFMFYRNPSADMLLKPEELDLELIRSAKIFHYGSISLIVEPCRSAHIKAMEEAKKAGVLLSYDPNLRLPLWPSANEAREQIKSIWNKADIIKVSDEELKFLTQNEKVDDEAAMSLWHDGLKLLLVTLGEQGCRYYTKNFRGSVDPFKVKAVDTTGAGDSFVGALLCKIVDDQSVLQDEKKLREILKFANACGAITTTKKGAIPALPSEADVAALIKASS

SEQ ID NO: 2923 - protein, 326 aa, Brassica rapa
MAASNGEKSLIVSFGEMLIDFVPTVSGVSLAEAPGFIKAPGGPPANVAIAVSRLGGRAAFVGKLGDDEFGHMLAGILKQNGVSAEGINFDTGARTALAFVTLRSDGERDFMFYRNPSADMLLRPDELNLDLIKSAKVFHYGSISLIVEPCRSAHLKAMEVAKEAGALLSYDPNLRLPLWPSKEEAKKQILSIWDKAEVIKVSDEELMFLTGSDNVDDETALSLWHDNLKLLLVTLGEKGCKYYTKSFRGSVDPFHVNTVDTTGAGDSFVGALLCNIVDDRSVLEEEARLREVLRFANACGAITTTKKGAIPALPTVSEVQTLLNGN

SEQ ID NO: 2924 - protein, 326 aa, Brassica napus
MTTSNGEKSLIVSFGEMLIDFVPTVSGVSLAEAPGFIKAPGGAPANVAIAVSRLGGRAAFVGKLGDDEFGHMLAGILKQNGVSAEGINFDTGARTALAFVTLRSDGEREFMFYRNPSADMLLRPDELNLDLIKSAKVFHYGSISLIVEPCRSAHLKAMEVAKESGALLSYDPNLRLPLWPSKEEAKKQILSIGNKAEVIKVSEEELMFLTGSDNVDDETALSLWHSNLKLLLVTLGEKGCNYYTKSFRGSVDPFHVNAVDTTGAGDSYVGALLCNIVDDRSVLEDEARLREVLRFANACGAITTTKKGAIPALPTESEVQSLLNGN

SEQ ID NO: 2925 - protein, 341 aa, Petunia hybrida
MATNGVNNSSGLIVSFGEMLIDFVPTVSGVSLAEAPGFVKAPGGAPANVAIAVTRLGGKSAFMGKLGDDEFGHMLAGILKENGVNAEGINFDEGARTALAFVTLRADGEREFMFYRNPSADMLLTPEELNLDVIRSAKVFHYGSISLIVEPCRSAHLKAMEVAKEAGALLSYDPNLRLPLWPSAEEAKKQILSIWDKADVIKVSDEELEFLTGSDKIDDESAMSLWHPNLKLLLVTLGAKGCKYYTKNFHGGVEGFHVKTVDTTGAGDSFVGALLTKIVDDQSIIEDEARLKEVLTFACACGAITTTKKGAIPALPTESEALALLKEDNRYKHAITLSPFC

SEQ ID NO: 2926 - protein, 328 aa, Populus trichocarpa
MASNGVNDKSLIVSFGEMLIDFVPTTSGVSLAEAPGFLKAPGGAPANVAIAVARLGGKSAFVGKLGDDEFGHMLAGILKENDVIASGINFDTGARTALAFVTLRADGEREFMFYRNPSADMLLRPEELNLELIRSAKVFHYGSISLIVEPCRSAHLEAMKVAKEAGALLSYDPNLRLPLWPSAEEAREQILKIWDEADVIKVSDVELEFLTGSNKIDDETALTLWRPNFKLLLVTLGENGCKYYTKAFHGTVEAFHVETIDTTGAGDSFIGALLCKIVDDQSVLEDEQKLREILRFANACGAITTTKKGAIPALPTPSEVHKLLNASK

SEQ ID NO: 2927 - protein, 324 aa, Tripterygium wilfordii
AGESSGSLIVSFGEMLIDFVPTVSGVSLAEAPGFLKAPGGAPANVAIAVARLGGHAAFVGKLGDDEFGRMLAGILDENGVSTKGINFDQGARTALAFVTLRADGEREFMFYRNPSADMLLTPEELNLELIRSAKAFHYGSISLIVEPCRSAHLKAMEAAKDAGALLSYDPNLRLPLWPSPAEAREQIMSIWDKAEVIKVSDVELEFLTGSDKIDDADALSLWHPNLKLLLVTLGEKGCRYYTKNFHGQVDAFHVKAVDTTGAGDAFVGALLCKIVDDQSVIEDEARLREVLKFANGCGAITTTKKGAIPALPTASEVLNLVKGA

SEQ ID NO: 2928 - protein, 326 aa, Brassica oleracea
MATSTGEKSLIVSFGEMLIDFVPTVSGVSLAEAPGFIKAPGGAPANVAIAVSRLGGRAAFVGKLGDDEFGHMLAGILKQNGVSAEGINFDTGARTALAFVTLRSDGEREFMFYRNPSADMLLRPDELNLDLIKSAKVFHYGSISLIVEPCRSAHLKAMEVAKEAGALLSYDPNLRLPLWPSKEEAKKQILSIWDKAEVIKVSDEELMFLTGSDNADDETALSLWHDNLKLLLVTLGEKGCNYYTKSFRGSVDPFHVNAVDTTGAGDSYVGALLCNIVDDRSVLEDEARLREVLRFANACGAITTTKKGAIPALPTESEVQSLLNGN

SEQ ID NO: 2929 - protein, 331 aa, Beta vulgaris
MAELNNGGHSKGLVVSFGEMLIDFVPTSSGVSLAEAPGFLKAPGGAPANVAIAVSRLGGNAAFVGKLGDDEFGHMLAGILKKNGVSADGLSFDKGARTALAFVTLKSDGEREFMFYRNPSADMLLTPDELNLDLIRSAKVFHYGSIRLIVEPCRSAHLKAMEEAKKAGALLSYDPNLRLPLWPSAEEAREQIMSIWDKAEVIKVSDNELEFLTGNSTIDDATAMSLWHPNLKLLLVTLGDQGCRYYTKNFKGSLDGFKVNAVDTTGAGDSFVGALLNKIVDDHSIIEDESRLKEVLKFANACGAITTTKKGAIPALPTVADALELIKKNAS

SEQ ID NO: 2930 - protein, 328 aa, Euonymus alatus
MASKAVHNGESAGSLIVSFGEMLIDFVPTVSGVSLAEAPGFLKAPGGAPANVAIAVARLGGHAAFVGKLGDDEFGHMLAGILGENGVSTKGINFDLGARTALAFVTLRADGEREFMFYRNPSADMLLTPEELNLELIRSAKVFHYGSISLIVEPCRSAHLKAMEAAKEAGALLSYDPNLRLPLWPSPEVAREQIMSIWDKAEVIKVSDVELEFLTGSNKIDDADALSLWHPNLKLLLVTLGEKGCRYYTKNFHGQVGAFNVEAVDTTGAGDAFVGALLSKIVDDQSVIEDESRLREVLKFANACGAITTTKKGAIPALPTTSEVLTFV

SEQ ID NO: 2931 - protein, 329 aa, Helianthus annuus
MAATNGVTDKKLIVSFGEMLIDFVPTVSGVSLAEAPGFLKAPGGAPANVAIAVSRLGGDAAFVGKLGDDEFGHMLAGILKENGVSGEGICFDKGARTALAFVTLKSDGDREFMFYRNPSADMLLTPEELNLEIIRSAKVFHYGSISLIVEPCRSAHLKAMEVAKEAGALLSYDPNLRLPLWPSAEEAREQIMSIWEKAEVIKVSDNELEFLTGSDKIDDESAMSLWHPNLKLLLVTLGDKGCNYYTKHFHGTVGAFPVKAVDTTGAGDSFVGALLTKIVDDQSVLEDEARLKEILRYSCACGAITTTKKGAIPALPTVPELDAFLKAHP

SEQ ID NO: 2932 - protein, 325 aa, Arabidopsis thaliana
MASNGDKGLIVSFGEMLIDFVPTESGVSLAEAPGFLKAPGGAPANVAIAVSRLGGRSAFVGKLGDDEFGHMLAGILRKNGVDDQGINFDTGARTALAFVTLRADGDREFMFYRNPSADMLLRPDELNLDLIRSAKVFHYGSISLIVEPCRSAHLKAMEVAKEAGALLSYDPNLREPLWPSKEEAKTQIMSIWDKAEIIKVSDVELEFLTGSNKIDDETALTLWHPNLKLLLVTLGEKGCRYYTKTFKGAVDPFHVNAVDTTGAGDSFVGALLNQIVDDRSVLEDEERLRKVLRFANACGAITTTKKGAIPALPSDAEVRSFLEKK

SEQ ID NO: 2933 - protein, 331 aa, Arnica chamissonis
MAANNGVVKHDGGLIVSFGEMLIDFVPTVSGVSLAEAPGFLKAPGGAPANVAIAVSRLGGKSAFVGKLGDDEFGHMLAGILKENGVSGEGINFDKGARTALAFVTLKADGDREFMFYRNPSADMLLTPDELNLELIRSAKVFHYGSISLIVEPCRSAHLKAMEVAKDAGALLSYDPNLRLPLWPSAEEAREQIMSIWDKAEVIKVSDNELEFLTGSDKIDDESAMSLWHPNLKLLLVTLGDKGCNYYTKHFHGTVGAFPVKAVDTTGAGDSFVGALLTKIVDDQSVLEDEGKLKEILRYSCACGAITTTKKGAIPALPTVPEVDAFLNSHH

SEQ ID NO: 2934 - protein, 326 aa, Brassica oleracea
MSTSNGEKSLIVSFGEMLIDFVPTVSGVSLSEAPGFIKAPGGAPANVAIAVARLGGRAAFVGKLGDDEFGHMLAGILKQNGVSADGINFDTGARTALAFVTLRSDGEREFMFYRNPSADMLLRPDELNLDLIRSAKVFHYGSISLIVEPCRSAHLKAMEVAKEAGALLSYDPNLRLPLWPSKEEAKKQILSIWDKAEVIKVSDEELMFLTGSDNVDDETALSLWHDNLKLLLVTLGEKGCNYYTKSFRGSVDPFHVDAVDTTGAGDSYVGALLCNIVDDRSVLEDEARLREVLRFANACGAITTTKKGAIPALPTVSEVQALLNGN

SEQ ID NO: 2935 - protein, 327 aa, Panax ginseng
MAINGVSPTGGLVVSFGEMLIDFVPTVSGVSLADAPGFLKAPGGAPANVAIAVSRLGGKAAFVGKLGDDEFGQMLARILKQNGVSADGVNFDKGARTALAFVTLRADGEREFMFYRNPSADMLLTPDELNLELIRSAKVFHYGSISLIVEPCRSSHLKAMEEAKEAGALLSYDPNLRLPLWPSAEEAREKILSIWDKADVIKVSDNELEFLTGKEVSDEAAMSLWHPNLKLLLVTLGEKGCSYYTKNFHGSVPGFHVKTVDTTGAGDSFIGALLQKMVEDQSIITEEAKLKEVLRFACACGAITTTKKGAIPALPTESEALKLLNAA

SEQ ID NO: 2936 - protein, 326 aa, Brassica rapa
MATSTGEKSLIVSFGEMLIDFVPTVSGVSLAEAPGFIKAPGGAPANVAIAVSRLGGRAAFVGKLGDDEFGHMLAGILKQNGVSAEGINFDTGARTALAFVTLRSDGEREFMFYRNPSADMLLRPDELNLDLIKSAKVFHYGSISLIVEPCRSAHLKAMEVAKEAGALLSYDPNLRLPLWPSEEEAKKQILSIWDKAEVIKVSDEELMFLTGSDNVDDETALSLWHDNLKLLLVTLGEKGCNYYTKSFRGSVDPFHVNAVDTTGAGDSYVGALLCNIVDDRAVLEDEARLREVLRFANACGAITTTKKGAIPALPTESEVQSLLNGN

SEQ ID NO: 2937 - protein, 333 aa, Euphorbia peplus
MTSAVVTNGNSHSSSLIVSFGEMLIDFVPTVSGVSLAEAPGFLKAPGGAPANVAIAVARLGGNAAFVGKLGDDEFGHMLAGILKENGVNGNGINFDKGARTALAFVTLRADGEREFMFYRNPSADMLLTPEELNLEVIRSAKVFHYGSISLIVEPCRSAHLKAMEVAKDAGALLSYDPNLRLPLWPSAEYAREQIMSIWDKAEVIKVSDNELEFLTGSDKISDEDALSLWHPNLKLMLVTLGEKGCRYYTKNFRGQVDGFHVKTVDTTGAGDSFVGSLLCKIVDDHSVLDDEPRLREILRFANACGAITTTKKGAIPALPTVSDVVGLIEASK

SEQ ID NO: 2938 - protein, 325 aa, Brassica juncea
MASNGEKPLIVSFGEMLIDFVPTESGVSLAEAPGFLKAPGGAPANVAIAVSRLGGRSAFVGKLGDDEFGHMLAGILRKNGVADQGINFDTGARTALAFVTLKADGDREFMFYRNPSADMLLRPDELDLELIRSAKVFHYGSISLIVEPCRSAHLKAMEVAKEAGALLSYDPNLREPLWPSKEEAKTQIMSIWDKAEIIKVSDVELEFLTGSNKIDDETAMSLWHPNLKLLLVTLGEKGCRYYAKNFRGSVDPFHVNAVDTTGAGDSFVGALLNKIADDHSILEDEERLRKVLRFANACGAITTTKKGAIPALPSEAEVLSFLEGK

SEQ ID NO: 2939 - protein, 325 aa, Brassica oleracea
MASNGDKPLIVSFGEMLIDFVPTESGVSLAEAPGFLKAPGGAPANVAIAVSRLGGRSAFVGKLGDDEFGHMLAGILRKNGVADQGINFDTGARTALAFVTLKADGDREFMFYRNPSADMLLRPDELNLELIRSAKVFHYGSISLIVEPCRSAHLKAMEVAKEAGALLSYDPNLREPLWPSKEEAKTQIMSIWDKAEIIKVSDVELEFLTGSNKIDDETAMSLWHPNLKLLLVTLGEKGCRYYAKNFRGSVDPFHVNAVDTTGAGDSFVGALLNKIADDHSILEDEERLRKVLRFANACGAITTTKKGAIPALPSDAEVLSFLEGK

SEQ ID NO: 2940 - protein, 325 aa, Brassica napus
  Sequence also found in Organisms: Brassica rapa
MASNGEKPLIVSFGEMLIDFVPTESGVSLAEAPGFLKAPGGAPANVAIAVSRLGGRSAFVGKLGDDEFGHMLAGILRKNGVADQGINFDTGARTALAFVTLKADGDREFMFYRNPSADMLLRPDELNLELIRSAKVFHYGSISLIVEPCRSAHLKAMEVAKEAGALLSYDPNLREPLWPSKEEAKTQIMSIWDKAEIIKVSDVELEFLTGSNKIDDETAMSLWHPNLKLLLVTLGEKGCRYYAKNFRGSVDPFHVNAVDTTGAGDSFVGALLNKIADDHSILEDEERLRKVLRFANACGAITTTKKGAIPALPSDAEVLSFLEGK

SEQ ID NO: 2941 - protein, 326 aa, Brassica napus
MAASNSEKGLIVSFGEMLIDFVPTESGVSLAEAPGFLKAPGGAPANVAIAVSRLGGRSAFVGKLGDDEFGHMLAGILKENGVADQGINFDTGARTALAFVTLRADGDREFMFYRNPSADMLLRPDELDLDLIRSAKVFHYGSISLIVEPCRSAHLKAMEVAKEAGAILSYDPNLREPLWPSNEEAKTQIMSIWDKAEIIKVSDVELEFLTGSNKIDDETAMSLWHPNLKLLLVTLGEKGCRYYAKTFRGSVDPFHVNAVDTTGAGDSFVGALLNKIAEDQSILEDEERLRKVLRFANACGAITTTKKGAIPALPTDAEVLSFLEGK

SEQ ID NO: 2942 - protein, 327 aa, Panax ginseng
MAINGVSPTGGMVVSFGEMLIDFVPTVSGVSLADAPGFLKAPGGAPANVAIAVSRLGGKAAFVGKLGDDEFGQMLARILKENGVSADGVNFDKGARTALAFVTLRADGEREFMFYRNPSADMLLTPDELNLELIRSAKVFHYGSISLIVEPCRSSHLKAMEEAKEAGALLSYDPNLRLPLWPSAEEAREKILSIWDKADVIKVSDNELEFLTGKEVSDEAAMSLWHPNLKLLLVTLGEKGCSYYTKNFHGYVPGFHVKTVDTTGAGDSFIGALLHKMVEDQSIITEEAKLKEVLRFACACGAITTTKKGAIPALPTESEALKLLNAA

SEQ ID NO: 2943 - protein, 327 aa, Panax ginseng
MAINGVSPTGGLVVSFGEMLIDFVPTVSGVSLADAPGFLKAPGGAPANVAIAVSRLGGKAAFVGKLGDDEFGQMLARILKENGVSADGVNFDKGARTALAFVTLRADGEREFMFYRNPSADMLLTPDELNLELIRSAKVFHYGSISLIVEPCRSSHLKAMEEAKEAGALLSYDPNLRLPLWPSAEEAREKILSIWDKADVIKVSDNELEFLTGKEVSDEAAMSLWHPNLKLLLVTLGEKGCSYYTKNFHGYVPGFHVKTVDTTGAGDSFIGALLHKMVEDQSIITEEAKLKEVLRFACACGAITTIKKGAIPALPTESEALKLLNAA

SEQ ID NO: 2944 - protein, 330 aa, Orobanche aegyptiaca
MAVSNGDSGKGLIVSFGEMLIDFVPTVSGVSLAEAPGFLKAPGGAPANVAIAVARLGGNAAFVGKLGDDEFGHMLAGILKENGVSADGVTFDKGARTALAFVTLRADGEREFMFYRNPSADMLLTPDELDIGLIRSAKVFHYGSISLIVEPCRSAHLKAMEEAKSAGALLSYDPNLRLPLWPSAEYAKEQIMSIWNQADLIKVSDVELEFLTGSDKIDDESALSLWHPNLQLLLVTLGEKGCRYYTKKFRGSIAGYPVKTVDTTGAGDSFVGSLLGKIVDDHSIIHDEVRLKEVLKYACACGAITTTKKGAIPALPNHSEVLTILNGPSK

SEQ ID NO: 2945 - protein, 326 aa, Raphanus sativus
MAASNGDKGLIVSFGEMLIDFVPTESGVSLAEAPGFLKAPGGAPANVAIAVTRLGGRSAFVGKLGDDEFGHMLAGILRENGVADRGINFDTGARTALAFVTLRADGDREFMFYRNPSADMLLRPDELDLDLIRSAKVFHYGSISLIVEPCRSAHLKAMEVAKEAGALLSYDPNLREPLWPSKEEAKTQIMSIWDKAEIIKVSDVELEFLTGSDKIDDETAMSLWHPNLKLLLVTLGEKGCRYYAKTFRGSVDPFHVNAVDTTGAGDSFVGALLNQIAEDQSILEDEERLRKVLRFANACGAITTTKKGAIPALPTDAEVLTFLEGK

SEQ ID NO: 2946 - protein, 326 aa, Brassica rapa
MSTSNGEKSLIVSFGEMLIDFVPTVSGVSLSEAPGFIKAPGGAPANVAIAVARLGGRAAFVGKLGDDEFGHMLAGILKQNGVSAEGINFDTGARTALAFVTLRSDGEREFMFYRNPSADMLLRPDELNLDLIRSAKVFHYGSISLIVEPCRSAHLKAMEVAKEAGALLSYDPNLRLPLWPSKEEAKKQILSIWDKAEVIKVSDEELMFLTGSDNVDDETALSLWHDNLKLLLVTLGEKGCNYYTKSFRGSVDPFHVDAVDTTGAGDSYVGALLCNIVDDRSVLEDEARLREVLRFANACGAITTTKKGAIPALPTVSEVETLLNAN

SEQ ID NO: 2947 - protein, 327 aa, Panax ginseng
MAINGVSPTGGLVVSFGEMLIDFVPTVSGVSLADAPGFLKAPGGAPANVAIAVSRLGGKAAFVGKLGDDEFGQMLARILKQNGVSADGVNFDKGARTALAFVTLRADGEREFMFYRNPSADMLLTPDELNLDLIRSAKVFHYGSISLIVEPCRSSHLKAMEEAKEAGALLSYDPNLRLPLWPSAEEAREKILSIWDKADVIKVSDNELEFLTGKEVSDEAAMSLWHPNLKLLLVTLGEKGCSYYTKNFHGSVPGFHVKTVDTTGAGDSFIGALLHKMVEDQSIITEEAKLKEVLRFACACGAITTTKKGAIPALPTESEALNLLNAA

SEQ ID NO: 2948 - protein, 325 aa, Tropaeolum majus
MASDGEKSLIVSFGEMLIDFVPTVSGVSLADAPGFLKAPGGAPANVAIAISRIGGRSAFIGKLGKDEFGLMLAGILKENGVATEGINFDTGARTALAFVTLREDGEREFMFYRNPSADMLLTPEELNLDLIRSAKVFHYGSISLIVEPCRSAHLKAMEVAKEAGALLSYDPNLRLPLWPSAEEARKQIMSIWDQAEVIKVSDNELEFLTGSDKIDDESAMSLWHSNLKLLLVTLGEKGCRYYTKNFHGAVEGFHVKAVDTTGAGDSFVGALLCKLVDDHSILEDEERLREILKFANACGAITTTKKGAIPALPTAAEALTLIDRQ

SEQ ID NO: 2949 - protein, 331 aa, Silene vulgaris
MAEQINGEQKTTGLVVSFGEMLIDFVPTESGVSLAEAPGFLKAPGGAPANVAIAVARMNGNAAFAGKLGADEFGRMLAAILKQNGVSDEGICFDEGARTALAFVTLRSDGEREFMFYRNPSADMLLRPDELNLELIRQAKVFHYGSISLIVEPCRSAHLKAMEEAKAAGALLSYDPNLRLPLWPSAEEARKQILSIWDKAEVIKVSDNELEFLTGNSDIGDDTAMSLWHPNLKLMLVTLGDHGCRYYTKTFKGSVEAFKVKAVDTTGAGDSFVGALLSKIVDDHAIIEDEPRLREVLKFANACGAITTTKKGAIPALPTETEALEFIKNSS

SEQ ID NO: 2950 - protein, 325 aa, Eutrema halophilum
MASNGEKGLIVSFGEMLIDFVPTESGVSLAEAPGFLKAPGGAPANVAIAVSRLGGRSAFVGKLGDDEFGHMLAGILRKNGVADQGINFDKGARTALAFVTLRADGDREFMFYRNPSADMLLRPDELNLELIRSAKVFHYGSISLIVEPCRSAHLKAMEVAKEAGALLSYDPNLREPLWPSKEEAKTQIMSIWDKAEIIKVSDVELEFLTGSNKIDDETALSLWHPNLKLLLVTLGEKGCRYYAKNFRGSVDPFHVDAVDTTGAGDSFVGALLNKIADDQSILEDEERLRKVLRFANACGAITTTKKGAIPALPSEAEVVSFLEGK

SEQ ID NO: 2951 - protein, 326 aa, Eutrema parvulum
MATSNGEKSLIVSFGEMLIDFVPTVSGVSLAEAPGFIKAPGGAPANVAIAISRLGGRSAFVGKLGDDEFGHMLAGILKQNGVSAEGINFDTGARTALAFVTLRSDGEREFMFYRNPSADMLLRPDELNLDLIRSAKVFHYGSISLIVEPCRSAHLKAMEVAKEAGALLSYDPNLRLPLWPSKEEAKKQILSIWDKAEVIKVSDEELMFLTGSDNVDDETALSLWHSNLKLLLVTLGDKGCKYYTKGFRGSVDPFHVKAVDTTGAGDSYVGALLCKIVDDRAVLEDEARLRGVLRFANACGAITTTKKGAIPALPTESEVQTLLNGN

SEQ ID NO: 2952 - protein, 325 aa, Eutrema parvulum
MASNGEKGLIVSFGEMLIDFVPTESGVSLAEAPGFLKAPGGAPANVAIAVSRLGGRSAFVGKLGDDEFGHMLAGILRKNGVADQGINFDKGARTALAFVTLRADGDREFMFYRNPSADMLLRPDELNLELIRSAKVFHYGSISLIVEPCRSAHLKAMEVAKEAGALLSYDPNLREPLWPSKEEAKTQIMSIWDKAEIIKVSDVELEFLTGSNKIDDETAMSLWHPNLKLLLVTLGEKGCRYYAKNFRGSVDPFHVNAVDTTGAGDSFVGALLNKIADDQSILEDEERLRKVLRFANACGAITTTKKGAIPALPSEAEVVSFLEGK

SEQ ID NO: 2953 - protein, 330 aa, Euonymus alatus
MASKADNNTGSLIVSFGEMLIDFVPTVSGVSLAEAPGFLKAAGGAPANVAIAVARLGGHAAFVGKLGDDEFGHMLAGILRENGVSTKGINFDLGARTALAFVTLRADGDREFMFYRNPSADMLLTPEELNLELIRSAKVFHYGSISLIVEPCRSAHLKAMEAAKDAGALLSYDPNLRLPLWPSPAEAREQIMSIWDKAEVIKVSDVELEFLTGSGKIDDADALSLWHPNLKLLLVTLGDKGCRYYTKNFHGQVDAFNVKAVDTTGAGDAFVGALLSKIVDDRSVIEDEQRLREVLKFANGCGAITTTKKGAIPALPTTSEVLTLVKGKQV

SEQ ID NO: 2954 - protein, 326 aa, Brassica napus
  Sequence also found in Organisms: Brassica oleracea
MAASNSEKGLIVSFGEMLIDFVPTESGVSLAEAPGFLKAPGGAPANVAIAVSRLGGRSAFVGKLGDDEFGHMLAGILRENGVADQGINFDTGARTALAFVTLRADGDREFMFYRNPSADMLLRPDELDLDLIRSAKVFHYGSISLIVEPCRSAHLKAMEVAKEAGAILSYDPNLREPLWPSNEEAKTQIMSIWDKAEIIKVSDVELEFLTGSNKIDDETAMSLWHPNLKLLLVTLGEKGCRYYAKTFRGSVDPFHVNAVDTTGAGDSFVGALLNKIAEDQSILEDEERLRKVLRFANACGAITTTKKGAIPALPTDAEVHSFLEGK

SEQ ID NO: 2955 - protein, 331 aa, Cichorium intybus
MAANNGVVKEGGLIVSFGEMLIDFVPTVSGVSLAEAPGFLKAPGGAPANVAIAVSRLGGKSAFVGKLGDDEFGHMLAGILKENGVNGEGINFDKGARTALAFVTLKADGDREFMFYRNPSADMLLTPDELNLELIRSAKVFHYGSISLIVEPCRSAHLKAMEVAKDAGALLSYDPNLRLPLWPSPEEAREQIMSIWDKAEVIKVSDNELEFLTGSNKIDDEAAMSLWHPNLKLLLVTLGDKGCNYYTKHFHGTVGAFPVKAVDTTGAGDSFVGALLTKIVDDQSVLEDEGKLKEILRYSCACGAITTTKKGAIPALPNVSEVHSFLNAPHH

SEQ ID NO: 2956 - protein, 331 aa, Cucumis melo
MASTNGALPSGSGLIVSFGEMLIDFVPTVSGVSLAEAPGFLKAPGGAPANVAIAVSRLGGRAAFVGKLGDDEFGRMLEGIVKENGVDASGIRFDQGARTALAFVTLRADGEREFMFYRNPSADMLLKPEELDLDLIRSAKIFHYGSISLIVEPCRSAHIKAMDEAKKAGVLLSYDPNLRLPLWPSANEAREQIKSIWNKADIIKVSDEELKFLTQKDKVDDENAMSLWHDGLKLLLVTLGEQGCRYYTKNFRGCVDPFKVKAVDTTGAGDSFVGALLSKIVDDQSVLQDEKKLRDILRFANACGAITTTKKGAIPALPTEADVAALIKASS

SEQ ID NO: 2957 - protein, 336 aa, Spinacia oleracea
MATPNNGELPNGADTKGLVVSFGEMLIDFVPTVSGVSLAEAPGFLKAPGGAPANVAIAVSRLGGNAAFVGKLGDDEFGNMLAGILKENGVSGDGLTFDKGARTALAFVTLKADGDREFMFYRNPSADMLLTPEELNLDLIRSAKVFHYGSISLIVEPCRSAHLKAMEEAKKAGALLSYDPNLRLPLWPSAKEAREQILSIWDKAEVIKISDNELEFLTETNTIDDATAMSLWHPNLKLLLVTLGDHGCKYYTKNFKGSVDAFKVKAVDTTGAGDSFVGALLGKMVDDHSIIEDESRLREALTFANACGAITTTKKGAIPALPTVEDVKELINKASN

SEQ ID NO: 2958 - protein, 329 aa, Triphysaria pusilla
MAANNSDLGKGLIVSFGEMLIDFVPTVSGVSLAEAPGFLKAPGGAPANVAIAVARLGGKAAFVGKLGEDEFGHMLAGILKENGVSADGVTFDKGARTALAFVTLRADGEREFMFYRNPSADMLLTPDELNLGIIRSAKVFHYGSISLIVEPCRSAHLKAMDEAKSAGALLSYDPNLRLPLWPSAKYAKEQIMSIWEKADIIKVSDNELEFLTGSSKIDDEAAMSLWHPKLQLLLVTLGEKGCRYYNKNFRGSIDGYHVKTVDTTGAGDSFVGALLGKIVDDHSIIHDEARLKEVLKYACACGAITTTKKGAIPALPQHSEVLSILNGAK

SEQ ID NO: 2959 - protein, 329 aa, Triphysaria pusilla
MAANNSDLGKGLIVSFGEMLIDFVPTVSGVSLAEAPGFLKAPGGAPANVAIAVVRLGGKAAFVGKLGEDEFGHMLAGILKENGVSADGVTFDKGARTALAFVTLRADGEREFMFYRNPSADMLLTPAELNLGIIRSAKVFHYGSISLIVEPCRSAHLKAMDEAKSAGALLSYDPNLRLPLWPSAKYAKEQIMSIWEKADIIKVSDNELEFLTGSSKIDDEAAMSLWHPKLQLLLVTLGEKGCRYYNKNFRGSIDGYHVKTVDTTGAGDSFVGALLGKIVDDHSIIHDEARLKEVLKYACACGAITTTKKGAIPALPQHSEVLSILNGAK

SEQ ID NO: 2960 - protein, 321 aa, Daucus carota
MAGGDLIVSFGEMLIDFVPTVSGVSLAEAPGFLKAPGGAPANVAIAVARLGGKAAFVGKLGDDEFGHMLAGILKENGVSGDGIKFDQGARTALAFVTLRADGEREFMFYRNPSADMLLTPEELNLDLIKSAKVFHYGSISLIVEPCRSAHLKAMEAAKQAGCLLSYDPNLRLPLWPSAKEAREKIMSIWDKADVIKVSDNELEFLTGKEVSDEAALSLWHPNLKLLLVTLGEKGCSYYTKNFHGTIPGFHVKTVDTTGAGDSFIGALLCKMVKDQSVITDEAKLKEVLKFACACGAITTTKKGAIPALPTESEALTLLKGN

SEQ ID NO: 2961 - protein, 329 aa, Triphysaria pusilla
MATNNSDLGKGLIVSFGEMLIDFVPTVSGVSLAEAPGFLKAPGGAPANVAIAVARLGGKAAFVGKLGEDEFGHMLAGILKENGVSADGVTFDKGARTALAFVTLRADGEREFMFYRNPSADMLLTPDELNLGIIRSAKVFHYGSISLIVEPCRSAHLKAMDEAKSAGALLSYDPNLRLPLWPSAKYAKEQIMSIWEKADIIKVSDNELEFLTGSSKIDDEAAMSLWHPKLQLLLVTLGEKGCRYYNKNFRGSIDGYHVKTVDTTGAGDSFVGALLGKIVDDHSIIHDEARLKGVLKYACACGAITTTKKGAIPALPQHSEVLSILNGAK

SEQ ID NO: 2962 - protein, 326 aa, Brassica napus
MATSDGEKSLIVSFGEMLIDFVPTVSGVSLSEAPGFIKAPGGAPANVAIAVARLGGRAAFVGKLGDDEFGHMLAGILKQNGVSAEGINFDTGARTALAFVTLRSDGEREFMFYRNPSADMLLRPDELNLDLIRSAKVFHYGSISLIVEPCRSAHLKAMEVAKEAGALLSYDPNLRLPLWPSKEEAKKQILSIWDKAEVIKVSDEELMFLTGSDNVDDETALSLWHDNLKLLLVTLGEKGCNYYTKSFRGSVDPFHVDAVDTTGAGDSYVGALLCNIVDDRSVLEDEARLREVLRFANACGAITTTKKGAIPALPTVSEVETLLNAK

SEQ ID NO: 2963 - protein, 325 aa, Brassica napus
  Sequence also found in Organisms: Brassica rapa
MAPTGEKPLIVSFGEMLIDFVPTESGVSLAEAPGFLKAPGGAPANVAIAVSRLGGRSAFVGKLGDDEFGHMLAGILRKNGVADQGINFDTGARTALAFVTLKADGDREFMFYRNPSADMLLRPDELDLELIRSAKVFHYGSISLIVEPCRSAHLKAMEVAKEAGALLSYDPNLREPLWPSKEEAKTQIMSIWDKAEIIKVSDVELEFLTGSNKIDDETAMSLWHPNLKLLLVTLGEKGCRYYAKNFRGSVDPFHVNAVDTTGAGDSFVGALLNKIADDHSILEDEERLRKVLRFANACGAITTTKKGAIPALPSEAEVLSFLEKK

SEQ ID NO: 2964 - protein, 325 aa, Brassica rapa
MASNLDKGLIVSFGEMLIDFVPTQSGVSLAESPGFLKAPGGAPANVAIAVTRLGGRAAFVGKLGDDEFGHMLAGILRENGVEDKGINFDKGARTALAFVTLRSDGDREFMFYRNPSADMLLRPDELNLELIRSAKVFHYGSISLITEPCRSAHLKAMEVAKEAGALLSYDPNLREPLWSSPEEARKQIMSIWDKAEIIKVSDVELEFLTQNKTIDDESAMSLWHPNLKLLLVTLGEKGCRYYTKGFHGSVEAFDVNAVDTTGAGDSFIGAFLSQIVDDQTVLKEEERLRKVLRFANACGAITTTKKGAIPALPSECDALSLLKDK

SEQ ID NO: 2965 - protein, 331 aa, Centaurea maculosa
MAATNGVVKEEGGLIVSFGEMLIDFVPTVSGVSLAEAPGFLKAPGGAPANIAIAVSRLGGKSAFVGKLGDDEFGHMLAGILKENGVNGDGINFDKGARTALAFVTLKADGDREFMFYRNPSADMLLTPDELNLELIRSAKVFHYGSISLIVEPCRSAHLKAMEVAKDAGALLSYDPNLRLPLWPSPEEARDQIMSIWDKAEVIKVSDNELEFLTGCETVNDEAAMSLWHPNLKLLLVTLGDKGCNYYTKNFHGTVGAFAVKAVDTTGAGDSFVGALLTKIVDDHSVLEDEPKLKELLRYACACGAITTTKKGAIPALPTVSEVQGFIKEHC

SEQ ID NO: 2966 - protein, 331 aa, Cucumis sativus
MASTNGAMPSGSGLILSFGEMLIDFVPTVSGVSLAEAPGFLKAPGGAPANVAIAVSRLGGRAAFVGKLGEDEFGRMLEGIVKENGVDASGIRFDQGARTALAFVTLRADGEREFMFYRNPSADMLLKPEELDLDLIRSAKIFHYGSISLIVEPCRSAHIKAMDEAKKAGVLLSYDPNLRLPLWPSANEAREQIKSIWNKADIIKVSDEELKFLTQKEKVDDENAMSLWHDGLKLLLVTLGEQGCRYYTKNFRGSVDPFKVKAVDTTGAGDSFVGALLTKIVDDQSVLQDEKKLRDILRFANACGAITTTKKGAIPALPSEADVAALIKASS

SEQ ID NO: 2967 - protein, 331 aa, Cynara scolymus
MAATNGVVKAEGGLIVSFGEMLIDFVPTVSGLSLAEAPGFLKAPGGAPANVAIAVSRLGGKSAFVGKLGDDEFGHMLAGILKENGACGEGINFDKGARTALAFVTLKADGDREFMFYRNPSADMLLTPDELNLELIRSAKVFHYGSISLIVEPCRSAHLKAMEVAKDAGALLSYDPNLRLPLWPSPEEAREQIMSIWDKAEVIKVSDNELEFLTGCEKIDDEAAMSLWHPNLKLLLVTLGDKGCNYYTKNFHGTVGAFAVKAVDTTGAGDSFVGALLTKIVDDHSVLEDEGKLKELLRYACACGAITTTKKGAIPALPTVSEVQGFIKEHC

SEQ ID NO: 2968 - protein, 331 aa, Taraxacum officinale
MSANNGVAKEGGLIVSFGEMLIDFVPTVSGVSLAEAPGFLKAPGGAPANVAIAVQRLGGKSAFVGKLGDDEFGHMLAGILKENGVSVEGINFDKGARTALAFVTLKADGDREFMFYRNPSADMLLTPDELNLELIRSAKVFHYGSISLIVEPCRSAHLKAMEVAKDAGALLSYDPNLRLPLWPSPEEAREQIMSIWDKAQVIKVSDNELEFLTGSNKIDDEAAMSLWHPHLKLLLVTLGDKGCNYYTKHFHGTVGAFPVKAVDTTGAGDSFVGALLTKIVDDQSVLEDEVKLKEILRYSCACGAITTTKKGAIPALPSVSEVQTFLNAGHH

SEQ ID NO: 2969 - protein, 331 aa, Lactuca sativa
MAANNGVAKEGGLIVSFGEMLIDFVPTVSGVSLAEAPGFLKAPGGAPANVAIAVSRLGGKSAFVGKLGDDEFGHMLAGILKENGVSGEGINFDKGARTALAFVTLKADGDREFMFYRNPSADMLLTPDELNLELIRSAKVFHYGSISLIVEPCRSAHLKAMEVAKDAGALLSYDPNLRLPLWPSPEEAREQIMSIWDKAEVIKVSDNELEFLTGNNKIDDECAMSLWHPNLKLLLVTLGDKGCNYYTKHFHGTIGAFAVKAVDTTGAGDSFVGALLTKLVDDHSVLEDEGKLRELLRFSCACGAITTTKKGAIPALPSVSEVHTFLDASHN

SEQ ID NO: 2970 - protein, 324 aa, Mimulus guttatus
MAKSNGLIVSFGEMLIDFVPTVSGVSLAEAPGFLKAPGGAPANVAIAVARLGGKAAFLGKLGDDEFGHMLAGILKENGVSADGVRFDKGARTALAFVTLRADGEREFMFYRNPSADMLLTPDELNLDLIKSAKVFHYGSISLIVEPCRSAHIKAMEVAKSAGALLSYDPNLRLPLWPSAEYAKEQIMSIWNKADVIKVSDVELEFLTGSNKIDDESAMSLWHDNLKLLLVTLGEKGCRYYTKQFRGSVDAYHVKAVDTTGAGDSFVGALLGKIVDDHAIIQDEAKLKEVLKYSCACGAITTTKKGAIPALPTHSEVLSVLNGPK

SEQ ID NO: 2971 - protein, 357 aa, Quercus alba
MAPNGVIEKTGAGLIVSFGEMLIDFVPTVSGVSLAEAPGFLKAPGGAPANVAIAVSRLGGKAAFVGKLGDDEFGHMLAGILRENGVVDEGINFDKGARTALAFVTLRADGEREFMFYRNPSADMLLTPDELNLDLIRSAKVFHYGSISLIVEPCRTAHLKAMEVAKDAGVLLSYDPNLRLPLWPSPEEARVQIKSIWDKADLIKVSDVELEFLTGSNKIDDESAMSLWHPNLKLLLVTLGDLGCRYYTKNFHGEVEAFRVNTVDTTGAGDSFVGALLCKIVDDQSILEDEPRLRAVLKFANACGAITTTKKGAIPALPTESDALSLIKLKRLGCASLFQPLFSLEHFFFFNAFVIFA

SEQ ID NO: 2972 - protein, 326 aa, Plantago ovata
MAQSSSSTSGLIVCFGEMLIDFVPTVSGVSLAEAPAFIKSPGGAPANAAIAVSRLGGKSAFVGKLGDDEFGRMLEGILVENGVSSAGVNFDKGARTALAFVTLRADGEREFMFYRNPSADMLLTPDELNLDLIRSSKVFHYGSISLIVEPCRSAHLKAMEVAKEAGALLSYDPNLRLPLWPSAEEAKKQILSIWNKADVIKVSDNELEFLTGSDKIDDESAMTLWHDKLKLLLVTLGEKGCRYYTKNFRGQIDGFHVKTVDTTGAGDSFVGALLCKIVDDHSIIQDEPRLKEVLKYACACGAITTTKKGAIPALPSHSEVLTLLGA

SEQ ID NO: 2973 - protein, 329 aa, Triphysaria pusilla
MAANNSNLNNGLIVSFGEMLIDFVPTVSGVSLAGAPGFIKAPGGAPANVAIAVARLGGNAAFVGKLGDDEFGHMLAAILKENGVSAEGVNFDEGARTALAFVTLRDDGEREFMFYRNPSADMLLTPEELNLDLIRSAKIFHYGSISLIVDPCRSAHLKAMDEAKSAGALLSYDPNLRLPLWPSAEYAKEQIMSIWEKADIIKVSDVELEFLTGSDKIDDESAMSLWHPNLQLLLVTLGEKGCRYYHKNFRGSIDGYRVETIDTTGAGDSFVGALLGKIVDDQAIIHDEVRLKEVLKYACACGAITTTKKGAIPALPEHSEALAILNGAK

SEQ ID NO: 2974 - protein, 332 aa, Mimulus guttatus
MAATNNSGSSSGLIVSFGEMLIDFVPTVSGVSLAEAPGFLKAPGGAPANVAIAVARLGGNAAFVGKLGDDEFGQMLAGILKENGVSAEGVNFDTGARTALAFVTLRADGEREFMFYRNPSADMLLTPDELNLDLIRSAKVFHYGSISLIVEPCRSAHLKAMEVAKAAGALLSYDPNLRLPLWSSAEEARRQIMSIWDQAEVIKVSDEELQFLTENDKVDDESAMSLWHDNLKLLLVTLGDKGCRYYTKNFRGEVDAYRVKTVDTTGAGDSFVGALLYKMVDDQTIIEDELRLKEVLKYACACGAITTTKKGAIPALPTPSQVLTLLNGTETM

SEQ ID NO: 2975 - protein, 332 aa, Mimulus guttatus
MAATNNSGSSNGLIVSFGEMLIDFVPTVSGVSLAEAPGFIKAPGGAPANVAIAVTRLGGNAAFVGKLGDDEFGQMLAGILRENGVSADGVNFDKDARTALAFVTLRADGEREFMFYRNPSADMLLTPDELNLDLIRSAKVFHYGSISLIVEPCRSAHLKAMEVAKAAGALLSYDPNLRLPLWSSAEEARKQILSIWNQAEVIKVSDEELQFLTQNDNIDDESAMSLWHDNLKLLLVTLGDKGCRYYTKNFRGAVDAYRVKTVDTTGAGDSFVGALLYKIVDDQAIIEDESRLKEVLKYACACGAITTTKKGAIPALPTPSQVLTVLNGTATE

SEQ ID NO: 2976 - protein, 328 aa, Eschscholzia californica
MASNNHENKGEIIVSFGEMLIDFVPTVSGVSLSEAPGFLKAPGGAPANVAIAITRLGGKSAFVGKLGDDEFGHMLAGILKSNGVISDGILFDQGARTALAFVTLRSDGEREFMFYRNPSADMLLREDELNLELIRKAKVFHYGSISLITEPCRSAHLKAMEVAKDAGAILSYDPNLRLPLWSSADEAREQILSIWDKADLIKVSDVEFEFLTGKDVVDDETAISLMHPSLKLFLVTLGEKGCRYYTKHFRGTVEAFTVKTVDTTGAGDAFVGALLCKIVEDESILEDESKLKKVLRFANACGAITTTKKGAIPALPNEEEVLKLVNGA

SEQ ID NO: 2977 - protein, 310 aa, Primula obconica
MLIDFVPTVSGVSLAEAPGFLKAPGGAPANVAIAVARLGGRAAFVGKLGDDEFGHMLKGILKENGVSVDGILFDQGARTALAFVTLRADGEREFMFYRNPSADMLLRPNELNLDQIRSAKIFHYGSISLIVEPCRSAHIKAMEVAKAGGALLSYDPNLRLPLWPSAEEARKQILSIWDKAEIIKVSDNELEFLTGSDKIDDESALSLWHSNLKLLLVTLGEKGCKYYTKSFRGTVDGFHVKAVDTTGAGDSFVGALLCKIVDDRAVLENEAKLRDVLKFANACGAITTTKKGAIPALPTEVDVLTLMQGN

SEQ ID NO: 2978 - protein, 587 aa, Glycine max
MRDENSKRSKLSWSKKMVRKFFNIKSKTEDSQANGVAYGGGDMEYRGRNSFSEREPCTIKKSKTEKFSRSTDQVRRAKMNLDHPRIIDVQNYSIFVATWNVAGRSPPSTLNLDDWLHSSSPADIYVLGFQEIVPLNAGNILGAEDNGPAKKWLALIRKALNNLPGTSGSSGCYTPSPIPQPVVELNADFEGSARQKNSSFFHRRSFQTTSSGWGMDNDPSVVQPRLDRRYSVCDRVIFGHRPSDFDPSFRWGYRPSDYSRASDYSRPSDYSRWGSSDDDNGLGDSPSTVLFSPMSCGGGGGAGPAFNEDGYAMPGHSRYCLVASKQMVGIYLTIWVRSELKDHVQNMKVSCVGRGLMGYLGNKGSISISMSVHETSFCFICSHLTSGQKEGDELRRNSDVMEILKKTRFPRVQGVDNEKSPQTILEHDRIIWLGDLNYRIALSYRSAKALVEMQNWRALLENDQLRIEQKRGRAFVGWNEGKIYFPPTYKYSTNSDRYAGDDMHPKEKRRTPAWCDRILWYGEGLHQLSYVRGESKFSDHRPVYGIFWAEVESAHGRLKKTMSCSRSRIEVEELLPYSGGYTELSFF

SEQ ID NO: 2979 - protein, 578 aa, Glycine max
MRDENSKKSKLSWSKKMVRKFFNIKSKTEDSQENGVAYGGGDTEYRGRNSFSEREPCTIKKSKTEKFGRSADQVRRARMNLDHPRIIDVQNYSIFVATWNVAGRSPPSTLNLDDWLHSSPPADIYVLGFQEIVPLNAGNILGAEDNGPAKKWLALIRKTLNNLPGTSGSSGCYTPSPIPQPVVELNADFEGSARQKNSSFFHRRSFQTTSSGWGMDNDPSVVQPRLDRRYSVCDRVIFGHRPSDFDPSFRWGYRPSDYSRASDYSRWGSSDDDNGLGDSPSTVLFSPMSCGGAGPAFNEDGYAIPGHSRYCLVASKQMVGIYLTIWVRSELKDQVQNMKVSCVGRGLMGYLGNKGSISISMSVHETSFCFICSHLTSGQKEGDELRRNSDVMEILKKTRFPRVQGVDNENSPQTILEHDRIIWLGDLNYRIALSYRSAKALVEMQNWRALLENDQLRIEQKRGRAFVGWNEGKIYFPPTYKYSTNSDRYAGDDMHPKEKRRTPAWCDRILWYGEGLHQLSYVRGESKFSDHRPVYGIFCAEVESTHGRLKKTMSCSRSRIEVEELLPYSGGYTELSFF

SEQ ID NO: 2980 - protein, 581 aa, Cajanus cajan
MKLSWSKKMVRKFFNIKSKTEDSQADVAYGGGDVEYRSRNSFSEREPCTIKKSKTEKFSRSTDQVRRARMNLDHPRIIDVQNHSIFVATWNVAGRSPPSNLNLDDWLHSSPPADIYVLGFQEIVPLNAGNILGAEDNGPAKKWLALIRKTLNNLPGTSGSSGCYTPSPIPQPVVELNADFEGSTRQKNSSFFHRRSFQTTSSGWGMDNDPSVVQPQLDRRYSVCDRVIFGHRPSDFDPSFRWGYRPSDYSRASDFSRPSDYSRPSDYSRWGSSVDDNGLGDSPSTVLFSPMSYGGGGLALNEDGYAMPGHSRYCLVASKQMVGIYLTIWVRSELKDHVQNMKVSCVGRGLMGYLGNKGSISISMSVHETSFCFICSHLTSGQKEGDEIRRNSDVMEILKKTRFPRVPGVDNEKSPQTILEHDRIIWLGDLNYRIALSYRSAKALVEMQNWRALLENDQLRIEQKRGRVFVGWNEGKIYFPPTYKYSTNSDRYAGDDMHPKEKRRTPAWCDRILWFGEGLHQLSYVRGESKFSDHRPVYGIFWAEVESAHGRLKKTMSCSRSRIEVEELLPYSGGYTELSFF

SEQ ID NO: 2981 - protein, 583 aa, Cicer arietinum
MGDENSKKSKLSWSKKMVRKFFNIKSKCECSQADTVVYGGGEVEYGSRNSFSEREPCTIKKSKTERFSRSTSQVRRGRMNLDHPRIIDVQNHSIFVATWNVAGRSPPSNLSLDDWLHSSPPADIYVLGFQEIVPLNAGNILGAEDNGPAKKWLSLIRKTLNNLPGTSGSSGCYTPSPIPQPVVELNADFEGSARQKNSSFFHRRSFQTTSSGWGMDNDPSVLQPQLDRRYSVCDRVIFGHRPSDFDPSLRWGYRPSDYSRASDYSRPSDYSRWGSSDDDNGLVDSPSTVLFSPMSYGGGSASNEDGYGMPGHSRYCLVASKQMVGIYLTVWVKGELKDHVRNMKVSCVGRGLMGYLGNKGSISISMSVHETSFCFICSHLTSGQKEGDELRRNSDVMEILKKTRFPRVHGVDNEKSPQTILEHDRIIWLGDLNYRIALSYRSAKALVEMQNWRALLENDQLRIEQKRGRAFVGWNEGKIYFPPTYKYSTNSDRYAGDDMHPKEKRRTPAWCDRILWYGEGLHQLSYVRGESRFSDHRPVYGIFWAEVESTHGKLKKSMSCSRSRIEVEELLPYSGGYTELNFF

SEQ ID NO: 2982 - protein, 583 aa, Medicago truncatula
MGDENSKNTKLSWSKKMVRKFFNFKSKCEDIQADAVVYGGGEVEYGSRNSFSEREPCTIKKSKTEKFSRSTSQVRRGRMNLDHPRIIDVQNYSIFVATWNVAGRSPPSNLSVDDWLHSSPPADIYVLGFQEIVPLNAGNILGAEDNGPAKKWLALIRKTLNNLPGTSGSSGCYTPSPIPQPVVELNADFEGSARQKNSSFFHRRSFQTTSSGWGMDNDPSLVQPQVDRRYSVCDRVIFGNRPSDFDPSLRWGYRPSDYSRASDYSRPSDYSRWGSSDDDNGLVDSPSTVLYSPMSTNGGSASNEDGYSMPGHSRYCLVASKQMVGIYLTVWVKGELKDHVRNMKVSCVGRGLMGYLGNKGSISISMSVHETSFCFICSHLTSGQKEGDELRRNSDVMEILKKTRFPRVHGVDNEKSPQTILEHDRIIWLGDLNYRIALSYRSAKALVEMQNWRALLENDQLRIEQKRGRAFVGWNEGKIYFPPTYKYSTNSDRYSGDDMHPKEKRRTPAWCDRILWYGEGLHQLSYVRGESRFSDHRPVYGIFWAEVESPHGKLKKSMSCSQSRIELDELLPYSGGYTELNFF

SEQ ID NO: 2983 - protein, 584 aa, Trifolium pratense
MRDENSKKTKLSWSKKMVRKFFNIKSKCEDSHEDAVVYGGSEVEYGSRNSFSEREPCTSKKSKIEKFSRNSSQVRRGRMNLDHPRIIDVQNYSIFVATWNVAGRSPPSNLRVDDWLHSSPPADIYVLGFQEIVPLNAGNILGAEDNGPAKKWLALIRKTLNNLPGTSGSSGCYTPSPIPKPVVELNADFEGSARQKNSSFFHRRSFQTTSSGWGMDNDPSVVQPQLDRRYSVCDRVIFGNRPSDFDPSLRWGYRPSDYSRASDYSRPSDYSRWGSSDDDNGLVDSPSTVLFSPMSTCGGSASNEDGYGMPGGNSRYCLVASKQMVGIYLTVWVKGELKDHVRNMKVSCVGRGLMGYLGNKGSISISMSVHETSFCFICSHLTSGQKEGDELRRNSDVMEILKKTRFPRVHGVDDEKSPQTILEHDRIIWLGDLNYRISLSYRSAKALVEMQNWRALLENDQLRIEQKRGRTFVGWKEGKIYFPPTYKYSTNSDRYSGDDMHPKEKRRTPAWCDRILWYGEGLHQLSYVRGESRFSDHRPVYGIFWAEVESPHGKLKKSMSCSGSRIEVDELLPYSGGYTELNFF

SEQ ID NO: 2984 - protein, 584 aa, Trifolium pratense
MRDENSKKTKLSWSKKMVRKFFNIKSKCEDSQEDAVVYGGSEVEYGSRNSFSEREPCTSKKSKIEKFSRNSSQVRRGRMNLDHPRIIDVQNYSIFVATWNVAGRSPPSNLSVDDWLHSSPPADIYVLGFQEIVPLNAGNILGAEDNGPAKKWLALIRKTLNNLPGASGSSGCYTPSPIPKPVVELNADFEGSARQKNSSFFHRRSFQTTSSGWGMDNDPSVVQPQTDRRYSVCDRVIFGNRPSDFDPSLRWGYRPSDYSRASDYSRPSDYSRWGSSDDDNGLVDSPSTVLFSPMSTCGGSASNEDGYGMPGGNSRYCLVASKQMVGIYLTVWVKGELKDHVRNMKVSCVGRGLMGYLGNKGSISISMSVHETSFCFICSHLTSGQKEGDELRRNSDVMEILKKTRFPRVHGVDDEKSPQTILEHDRIIWLGDLNYRISLSYRSAKALVEMQNWRALLENDQLRIEQKRGRTFVGWKEGKIYFPPTYKYSTNSDRYSGDDMHPKEKRRTPAWCDRILWYGEGLHQLSYVRGESRFSDHRPVYGIFWAEVESPHGKLKKSMSCSGSRIEVDELLPYSGGYTELNFF

SEQ ID NO: 2985 - protein, 579 aa, Glycine max
MTDGNSKKSKLSWSKRMVRKFFNIKSKAEDSYQSNGVAYGGDDVEYRSRNSSFSEREIKKSKTEKFSRNTEQVRRGRVSLDHPRIIDVHNYSIFVATWNVAGRSPPSNLSIDDWLHASPPADIYVLGFQEIVPLNAGNILGAEDNGPAKKWLALIGKTLNNLPGTSGGGGYYTPSPIPQPVVEINADFEGSARQKNSSFFHRRSFQTTSSGWGMDNDTSTMQPRLDRRFSVCDRVIFGHRKSDFDPSFRWGYRPSDYSRASDYSRPSDYSRWGSSDDDNGLGDSPSTVSPLSYGGPASAEDGYGMPGRSRYCLVASKQMVGIFLTIWVRSELKDHVRNMKVSCVGRGLMGYLGNKGSISISMSLHETSFCFICSHLTSGQKEGDELRRNSDVMEILKKTRFPRVHGADNEKSPETILEHDRIIWLGDLNYRIALSYRSAKALVEMQNWRALLENDQLRIEQKRGRAFVGWNEGKIYFPPTYKYSTNSDRYAGDDMHPKEKRRTPAWCDRILWYGEGLHQLSYVRGESRFSDHRPVYGIFWAEVESSHGRLKKSMSCSRNRIEVEELLPYSHGYTELSFF

SEQ ID NO: 2986 - protein, 581 aa, Cajanus cajan
FVFLGLVKLSWSKRMVRKLFNIKSKAEDSYQSNGVAYGGGDVEYRSRNSFSEREPCTIKKSKTEKFSRNTEQVRRGRVSLDHPRIIDVHNYSVFVATWNVAGRSPPSNLSIDDWLHASPPADIYVLGFQEIVPLNAGNILGAEDNGPAKKWLALIGKTLNNLPGTSGGGGYYTPSPIPQPVVELNADFEGSARQKNSSFFHRRSFQTTSSGWGMDNDPSTMQPRLDRRFSVCDRLISGPRKSDFDPSFRWGYRPSDYSRASDYSRPSDYSRWGSSDDDNGLGDSPSTVLFSPLSYAGPTFAEDGYTMPGRSRYCLVASKQMVGIFLTIWVRSELKDHVRNMKVSCVGRGLMGYLGNKGSISISMSLHETSFCFICSHLTSGQKEGDELRRNSDVMEILKKTRFPRVHGADDEKSPETILEHDRIIWLGDLNYRIALSYRSAKALVEMQNWRALLENDQLRIEQKRGRAFVGWNEGKIYFPPTYKYSTNSDRYAGDDMHPKEKRRTPAWCDRILWHGEGLHQLSYVRGESRFSDHRPVYGIFWAEVESSHGRLKKSMSCSRNRIEVEELLPYSHGYTELSFF

SEQ ID NO: 2987 - protein, 576 aa, Lotus japonicus
MKLSWSKKMVRKFFNIKSKSEDSQADGVPCGGSDVDYRSRSSCSEREPRTIKKSKTEKFSRSADQVRRGRMNLDHPRIIDVQNYSIFVGSWNVAGRSPPSNLSLDDWLHSSPPADIYVLGFQEIVPLNAGNILGAEDNGPAKKWLSLIRKTLNNLPGTSGSSACYTPSPIPQPVAELNADFEGSARQKNSSFFHRRSFQTTSSGWGMDNDPSVMQPRLDRRYSVCDRVISGHRPSDFDPSLRWGYRSSDYSRASDYSRPSDYSRPSDYSRWGSSDDDNGLGDSPSTVLYSPMSYGGPAASNEDGYGMPGNSRYCLVASKQMVGIYLTIWVRSELKDHVQNMKVSCVGRGLMGYLGNKGSISISMSVHETSFCFICSHLTSGQKEGDELRRNSDVMEILKKTRFPRVHGVDNEKSPQTILEHDRIIWLGDLNYRIALSYRSAKALVEMQNWRALLENDQKRGRAFVGWKEGKIYFPPTYKYSTNSDRYAGDDMHPKEKRRTPAWCDRILWYGEGLHQLSYVRGESRFSDHRPVYGRFGAEVVSTHGKMKKSMSCSRSRIEVEELLPYSGGYTELTFF

SEQ ID NO: 2988 - protein, 586 aa, Cicer arietinum
MRDENTNKTKVSWSKRMVRKFFNIKAKTEVSYQIQRDAVASGGGGLEYRSRSSLSEREPCTIKKSKTEKFSRNSSQVRRGRMNLDHPRVLDVHNYSIFTATWNVAGRSPPTNLSIDDWLHASPPADIYVLGFQEIVPLNAGNILGAEDNGPAKKWLALIGKTLNNLPGTSGGNGYYTPSPIPQPMVELNADFEGSARQKNSSFFHRRSFQTTSSSWGMDNDPSTVQPRLDRRFSVCDRVIFGNRKSDFDPSFRWGYRPSDYSRASDYSRPSDYSRWGSSDDDNGLGDSPSPVLFSPMSYGGPGTSGEDGYGMPGRSRYCLVASKQMVGIFLTIWVRGELKDHVKNMKVSCVGRGLMGYLGNKGSISISMSLHETSFCFICSHLTSGQKEGDELRRNSDVMEILKKTRFPRVHGSDNEKSPETILEHDRIIWLGDLNYRIALSYRSAKALVEMQNWRALLENDQLRIEQKRGRAFVGWNEGKIYFPPTYKYSTNSDRYSGDDKHSKEKRRTPAWCDRILWYGEGLHQLSYVRGESRFSDHRPVYGIFWAEVMSNHGKLKKSMSCSRSRIQVEELLPYSHGYTELNFF

SEQ ID NO: 2989 - protein, 579 aa, Theobroma cacao
MRDGKPKKSKLSWSKKMVRKWFNIKSKTEDFQADDHVYGGGEVEYRTSFSEREPCTIKKSKTEKFSKNTEQSRRGRMNLDHPRIIDVQNYSIFVATWNVAGRSPPSNLNLEDWLHASPPADIYVLGFQEIVPLNAGNILGAEDNGPAKKWLSLIRKTLNNLPGTSGGGGCYTPSPVPQPIVEMDADFEGSSRQKNSSFFHRRSFQTTSSWRMDNDPSISQPRLDRRYSVCDRVIFGHRPSDYDSSYRWGNRPSDYSRPSDYSRPSDYSRWGSSDDDNGIADSPSTVLYSPMSYGGSASNEQGYRMPGHSRYCLVASKQMVGIFLTIWVRSELRDHVKNMKVSCVGRGLMGYLGNKGSISVSMLLHQTSFCFICSHLTSGQKEGDELRRNSDVMEILKKTRFPRVHNAADEKSPETILQHDRIIWLGDLNYRIALSYRSAKALVEMQNWRALLENDQLRIEQKRGRVFVGWNEGKIYFPPTYKYSTNSDRYAGDEMHPKEKRRTPAWCDRILWYGEGLHQLSYVRGESRFSDHRPVYGIFWAEVESSHGRLKKSMSYSSSRIEVEELLPYAHGYTELNFF

SEQ ID NO: 2990 - protein, 575 aa, Lotus japonicus
MKLSWSKRMVRKFFNLKSKAEESHQAGDVAYGGGDVDYRSRSSLSEREQCTIKKSKTEKLSRNSSQARRGKMNLDHPRIIDVHNYSIFTATWNVAGRSPPSNLNLDDLLHASPPADIYVLGFQEIVPLNAGNILGAEDNGPAKKWLSLIGKTLNNLPGSSGCNGYYTPSPIPQPVVELNADFEGSARQKNSSFFQRRSFQTTSSNWGMDNDPSTALPRLDRRFSVCDRVIFGNRRSDFDPSFRWGYRPSDYSRASDYSRPSDYSRMGSSDDDNGLGDSPSTVLFSPMSYGGPASAEDVYGVQGRPRYCLFASKQMVGIFLTIWVRSELKDHVRNLKVSCVGRGLMGYLGNKGSISISMSLHETSFCFICSHLTSGQKEGDELRRNSDVMEILKKTRFPRVHGADNEKSPETILEHDRIIWLGDLNYRIALSYRTAKALVEMQNWRALLENDQLRIEQKRGRAFVGWNEGKIYFPPTYKYSTNSDRYAGDDMHPKEKRRTPAWCDRILWYGEGLHQLSYVRGESRFSDHKPVYAIFWAEVESNHGRLKKSMSCSRSRIEVEELLPYSHGYTELSFF

SEQ ID NO: 2991 - protein, 598 aa, Lupinus angustifolius
MRDDNSNKSKLSWSKRMVRKLFNIKSKSEDSPHQPEDGVAYNGGGDVQYRRRNSFSEREPSTIKKSKTEKFSRNSERVRRARMNLDHPRIVDVQNYSIFVATWNVGGRSPSSNLNLDDWLHASAPADIYVLGFQEIVPLNAGNILGAEDNGPAKKWTALIRKTLNNLPGTSGGGGYYTPSPVPQPVAELNADFEGSARQKNSSFFHRRSFQTSSNSWRMDNDPSTMQPQLDRRFSVCDRVIFGHRPSDFDPSLRWGYRPSDYSRASDYSRASDYSRPSDYSRPSDYSRWGSPDDDNGHGDSPSTVSFSPMSYGGPTSNEDGYGIPGNSRYCLVASKQMVGIFLTVWVRSELKDHVRNMKVSCVGRGLMGYLGNKGSISVSMSLHETSFCFVCSHLTSGQKEGDELRRNSDVMEILKKTRFPRVHGAGNEKSPETILEHDRIIWLGDLNYRIALSYRSATALVEMQNWRALLENDQLRIEQKRGRAFVGWNEGKIYFPPTYKYSTNSDRYAGGDMHPKEKRRTPAWCDRILWYGEGLHQLSYVRGESRFSDHRPVYGIFWAEVESSHGRLKKSMSCSRSRIEVEELLPHSRGYTELSFF

SEQ ID NO: 2992 - protein, 586 aa, Gossypium raimondii
MTDGKPKKSKLSWSKKMVRKWFNIKSKTEDFQADDHVYGGSFHQTSGGEVEYRTSFSEREPCTIKKSKTEKFSKNTEQSRRGRMNLDHPRIIDVQNYSIFVATWNVAGRSPPSNLNLEDWLHSSPPADIYVLGFQEIVPLNAGNILGAEDNGPAKKWLSLIRKTLNNLPGTSGGGGCYTPSPVPQPIVEMDADFEGSSRQKNSSFFHRRSFQTTNSWRMDNDPSISQPRLDRRFSVCDRVIFGHRPSDYDSSYRWGNRPSDYSRPSDYSRPSDYSRWGSSDDDNGIADSPSTVLYSPMSYGGSASNEQGYRMTGHSRYCLVASKQMVGIFLTIWVRSELRDHVKNMKVSCVGRGLMGYLGNKGSISVSMSVHQTSFCFICSHLTSGQKEGDELRRNSDVMEILKKTRFPPVHNAADEKSPETILEHDRIIWLGDLNYRISLSYRSAKALVEMQNWRALLENDQLRIEQKRGRAFVGWNEGKIYFPPTYKYSTNSDRYAGDDMHPKEKRRTPAWCDRILWYGEGLHQLSYVRGESRFSDHRPVYGIFWAEVESSHGRLKKSMSHSSSRIEAEDLLPYAHGYTELNFF

SEQ ID NO: 2993 - protein, 596 aa, Glycine max
MKFNILRLPIFGNFLTALLCILFVLVKLSWSKRMVRKFFNVKSKAEDSYQSNGVAYGGGDVEYRSRNSSFSEREIKKSKTDKFSRNTEQVRRGRVSLDHPRIIDVHNYSIFVASWNVAGRSPPSNLSIDDWLHASPPADIYVLGFQEIVPLNAGNILGAEDNGPAKKWLALIGKTLNNLPGTSGGGGYYTPSPIPQPVVEINADFEGSARQKNSSFFHRRSFQTTSSGWGLDNDSSTMQPRLDRRFSVCDRVIFGHRKSDFDPSYRWGYRPSDYSRASDYSRPSDYSRWGSSDDDNGLGDSPSTVSPLSYGGPASAEDGYGMPGRSRYCLVASKQMVGIFLTIWVRSELKDHVRNMKVSCVGRGLMGYLGNKGSISISMSLHETSFCFICSHLTSGQKEGDELRRNSDVMEILKKTRFPRVHDADNEKSPETILEHDRIIWLGDLNYRIALSYRSAKALVEMQNWRALLENDQLRIEQKRGRAFVGWNEGKIYFPPTYKYSTNSDRYAGDDMHPKEKRRTPAWCDRILWYGEGLHQLSYVRGESRFSDHRPVYGIFWAEVESSHGRLKKSMSCSRNRIEVEELLPYSHGYTELSFF

SEQ ID NO: 2994 - protein, 580 aa, Citrus sinensis
MRDGNSKKSKLSWSKKMVRKWFNIKSKTEEFQADDPVYGGGDQVEYRTSFSEREPCTIKKSKTEKFSKSGEPVRRGRMNLDHPRIIDVQNHSVFVATWNVAGRSPPSNLSLDDWLHASPPADIYVLGFQEIVPLNAGNVLGAEDNGPAKKWLALIRKTLNSLPGTSGSSGCYTQSPIPEPIVEMDADFEGSARRMNSSFFHRRSFQTTHSWKMDNDPSIPQPRLDRRFSVCDRVIFGHRPSDYDPSFRWGHRPSDYSRPSDYSRPSDYSRWGSSDDDNGPGDSPSTVLYSPMSYSGSGSMEHGYRMPGNSRYCLVASKQMVGIFLTVWVRSELRDHVKNMKVSCVGRGLMGYLGNKGSIAVSMLLHQTSFCFICSHLTSGQKEGDQLRRNADVMEILRKTRFPRVNSAGDEKSPETILQHDRVIWLGDLNYRIALNYRSAKALVEMQNWRVLLENDQLRKEQRQGRVFVGWNEGKIYFPPTYKYSTNSDRYAGDDMHPKEKRRTPAWCDRILWYGEGLHQLSYVRGESRFSDHRPVYGIFWAEVESSHNRLKKSISYSSSRIEVEELLPYSHGYTELNFF

SEQ ID NO: 2995 - protein, 580 aa, Citrus clementina
MRDGNSKKSKLSWSKKMVRKWFNIKSKTEEFQADDPVYGGGDQVEYRTSFSEREPCTIKKSKTEKFSKSGEPVRRGRMNLDHPRIIDVQNHSVFVATWNVAGRSPPSNLSLDDWLHASPPADIYVLGFQEIVPLNAGNVLGAEDNGPAKKWLALIRKTLNSLPGTSGSIGCYTQSPIPEPIVEMDADFEGSARRMNSSFFHRRSFQTTHSWKMDNDPSIPQPRLDRRFSVCDRVIFGHRPSDYDPSFRWGHRPSDYSRPSDYSRPSDYSRWGSSDDDNGPGDSPSTVLYSPMSYSGSGSMEHGYRMPGNSRYCLVASKQMVGIFLTVWVRSELRDHVKNMKVSCVGRGLMGYLGNKGSIAVSMLLHQTSFCFICSHLTSGQKEGDQLRRNADVMEILRKTRFPRVNSAGDEKSPETILQHDRVIWLGDLNYRIALNYRSAKALVEMQNWRVLLENDQLRKEQRQGRVFVGWNEGKIYFPPTYKYSTNSDRYAGDDMHPKEKRRTPAWCDRILWYGEGLHQLSYVRGESRFSDHRPVYGIFWAEVESSHNRLKKSISYSSSRIEVEELLPYSHGYTELNFF

SEQ ID NO: 2996 - protein, 583 aa, Gossypium raimondii
MRDGKAKKSKLSWSKKMVRKWFNIKSKTEDFQADDHVCGGGGEVEYRTSFSEREPCTIKKSKTEKFSRNTEQSRSRRGRMNLDHPRIIDVENYSIFASTWNVAGRSPPSNLNLEDLLHASSPADIYVLGFQEIVPLNAGNILGAEDNGPAKKWLSLIRKTLNNLPGTSGGGGCYTPSPVPQPIVEMDADFEGSSRQKNPSFFHRRSFQTTSSWRMDNDPSIPQPRLDRRFSVCDRVIFGHRPSDYDSSYRWGNRPSDYSRPSDYSRPSDYSRWGSSDDDNGITESPSTVLHSPMSYGGSASNEPGYRMPGHSRYCLVASKQMVGIFITIWVRSELRDHVKNMKVSCVGRGLMGYLGNKGSISVSMLVHQTSFCFICTHLTSGQKEGDELRRNSDVMEILKKTRFPRVHSEANEKSPETILEHDRIIWLGDLNYRIALSYRSAKALVEMQNWRALLENDQLRIEQKRGRVFKGWHEGKIYFPPTYKYSTNSDRYTGDAMHPKEKCRTPAWCDRILWYGEGIHQLSYVRGESKFSDHRPVYGIFWAEVESSRGQLKKSMSYSSSRRIEVEELLPYAHGYTELNFF

SEQ ID NO: 2997 - protein, 583 aa, Gossypium hirsutum
MRDGKAKKSKLSWSKKMVRKWFNIKSKTEDFQADDHVCGGGGEVEYRTSFSEREPCTIKKSKTEKFSRNTEQSRSRRGRMNLDHPRIIDVENYSIFASTWNVAGRSPLSNLNLEDLLHASSPADIYVLGFQEIVPLNAGNILGAEDNGPAKKWLSLIRKTLNNLPGTSGGVGCYTPSPVPQPIVEMDADFEGSSRQKNPSFFHRRSFQTTSSWRMDNDPSIPQPRLDRRFSVCDRVIFGHRPSDYDSSYRWGNRPSDYSRPSDYSRPSDYSRWGSSDDDNGITESPSTVLHSPMSYGGSASNEPGYRMPGHSRYCLVASKQMVGIFITIWVRSELRDHVKNMKVSCVGRGLMGYLGNKGSISVSMLVHQTSFCFICTHLTSGQKEGDELRRNSDVMEILKKTRFPRVHSEANEKSPETILEHDRIIWLGDLNYRIALSYRSAKALVEMQNWRALLENDQLRIEQKRGRVFKGWHEGKIYFPPTYKYSTNSDRYTGDAMHPKEKCRTPAWCDRILWYGEGIHQLSYVRGESKFSDHRPVYGIFWAEVESSRGQLKKSMSYSSSRRIEVEELLPYAHGYTELNFF

SEQ ID NO: 2998 - protein, 587 aa, Ricinus communis
MRDGNSNKSKLSWSKKMVRKWFNIKSKIEDFQADDVNGASHSSGAEVEYRTSFSEREPCTIKKSKTEKFTKNPEQVRRGRMNLDHPRIIDVQNHSIFVATWNVAGRSPPSNLSLDDWLHASPPADIYVLGFQEIVPLNAGNVLGAEDNGPAKKWLALIRKTLNNLPGTSGSGGCYTPSPIPEPIVEMDVDFEGSSRQKNSSFFHRRSFQTPYSWRMENDLSIPQPRLDRRFSVCDRVIFGHRPSDYDPSYRWGHRPSDFSRPSDYSRPSDYSRWGSSDDDNGPGDSPSTVLYSPMSYGGSYSGSASTEDGYRRPGYSRYCLVASKQMVGIFLTIWVRSELRDHVKNMKVSCVGRGLMGYLGNKGSISVSMSLHETTFCFVCTHLTSGQKEGDELRRNADVMEILKKTRFPRVSNAGDGKSPETILEHDRVIWLGDLNYRIALSYRSAKALVEMQNWRALLESDQLRNEQRRGRVFVGWNEGKIYFPPTYKYSTNSDRYAGDDMHPKEKRRTPAWCDRILWYGEGLQQLSYVRGESRFSDHRPVYGIFWAEVESTHGRLKKSMSYSSSRIEVEELLPYSQGYTELNFF

SEQ ID NO: 2999 - protein, 579 aa, Populus trichocarpa
MTDGNSKKSKLSWSKKMVRKWFNIKSKNEEFQADDVHGGEVQYRTSFSEREPCTIKKSKTEKFSKNPEQVRRNRMNLDHPRIIDVQNYSIFVASWNVAGRSPLSNLSLDDWLHASPPADIYVLGFQEIVPLNAGNVLGAEDNGPAKKWLALIRKTLNNLPGTSGSGGCYTPSPIPEPIVEIDADFEGSSRQKNASFFHRRSFQTTNSWRMDNDPSIPQPRLDRRFSVCDRVIFGHRPSDYDPSNRWGHRPSDYSRPSDYSRPSDYSRWGSSDDDNGPGESPSTVLYSPMSNGNSYSASTEDGYRRPGHSRYCLVASKQMVGIFLTIWVRSDLREHVKNMKVSCVGRGLMGYLGNKGSISVSMSLHQTSFCFICSHLTSGQKEGDELRRNADVMEILKKTRFPRVHNSGDEKSPETILEHDRVIWLGDLNYRIALSYRAAKALVEMQNWRALLENDQLRIEQRRGRVFRGWSEGKIYFPPTYKYSTNSDRYAGDDMHPKEKRRTPAWCDRILWHGEGLQQSSYVRGESRFSDHRPVYGIFWAEVESSHGPLRKSTSYSSSRIEVEELLPYSHGYTELNFF

SEQ ID NO: 3000 - protein, 579 aa, Phaseolus vulgaris
MGDQNSKKSKLSWSKRMARKFFNIRSKEEDSFQSNGVAYGGGEVEYRSRKSFSEREPCTIKKSKTEKIGRNTEQVRRGRASLDHPRIVDVHNYSVFVATWNVAGRSPPSNLSIDDWLHASPPADIYVLGFQEVVPLNVGNILGSEDNNPAKKWLALIGRTLNNLPGSSGGGGYYTPSPLTQPVVELNADFEGSSRQKNPSFFHRLSFQTSSSSWGTDDDPSSMQPQLDRRFSVCDRVIFGHRKSDFDPGFRWGYRPSDYSRASDYSRPSDYSRWSLSDDDNALRDSPNTVLFSPLSHGGPATTEDGHGRHCLVASKQMVGIFLTIWVRSELKDHVKNIKVSCVGRGLMGYLGNKGSISISMSLHETSFCFICSHLTSGQKEGDELRRNSDVIEILKKTRFPRVHGADNEKSLETILQHDRIIWLGDLNYRIVLSYRSAKALVEMQNWRALLENDQLRIEQKRGRAFVGWNEGKIYFPPTYKYSTNSDRYAGDDMHPKEKKRTPAWCDRILWYGEGLHQLSYVRGESRFSDHKPVYGIFSAEVETSHGRLKKSMSCCSKNRIEVEELLPYSHGYTELSFF

SEQ ID NO: 3001 - protein, 591 aa, Prunus persica
MRDENSKKSKLSWSKKMVRKWFNIKSKTEDFQADDVVSGGGDQVEYRTSFSEREPCTIKKSKTEKFSKNPEQVRRRKMNLDHPRIIDVENHSIFVATWNVAGRSPPSNLKLDEWLHASPPADIYVLGFQEIVPLNAGNVLGAEDNGPAKKWLALIRKTLNNLPGTSGGSGCYTPSPIPHPIVELHADFEGSSRQKSSSFFQRRSFQATQSWRTENDPSISQPRLDRRFSVCDRVIFGHRPSDYDPSFRWGHRPSDYSRPSDYSRPSDYSRPSDYSRWASSDDDNGPGDSPSTVLFSPMSYGGSASNENGYRMPGGHSRYNLVASKQMVGIFLTVWVRSELRDYVQNMKVSCVGRGLMGYLGNKGSISVSMSLHDTTFCFVCTHLTSGQKEGDELRRNSDVMEILRKTRFPRVNGSRALKSPETILEHDRVIWLGDLNYRISLSYRSAKALVEMQNWRALLENDQACFQLRLEQKRGRVFAGWNEGKIYFPPTYKYSTNSDRYAGDDMHPKEKRRTPAWCDRILWYGEGLQQLSYVRGESRFSDHRPVYGVFWAEVESSQSRLKKSTSYSSSRIEVEELLPYSHGYTELNFF

SEQ ID NO: 3002 - protein, 584 aa, Lupinus angustifolius
MKLSWSKRMVRKLFNIKSESEDPPHQPQHGLAHNGGGDVQYRRRNSFSEREPSTIKKSKTERFSRNLERVRRGRMNLDHPRIIDVQNYRIFVATWNVAGRSPPSNLNMDDWLHASAPADIYVLGFQEIVPLNAGNILGAEDNGPAKKWTALIRKTLNNLPGTSGGSGYYTPSPAPQPVAELNADFEGSARQKNSSFFHRRSFQTPSNSWRMDNDPSTVQPQLDRRFSVCDRVILGHRQSDIDPSLRWGYRPSDYSRASDYSRASDYSRPSDYSRWGSTEDDNGLGDSPSTVSFSPMSYGGPASNEDVYRLPGNSRYYLVSSKQMVGIFLTVWVRGELKDHVRNMKVSCVGRGLMGYLGNKGSISVSMSLHETNFCFICSHLTSGQKEGDELRRNSDVAEILKKTRFPRVHGVDDEKSPETILEHDRIIWLGDLNYRISLSYRSATALVEMQNWRALLENDQLRIEQKRGRAFVGWNEGKIYFPPTYKYSTNSDRYAGGDMHPKEKRRTPAWCDRILWYGEGLHQLSYVRGESRFSDHRPVYGIFWAEVESSHGRLKKSTSCSASRIEVEELLPYSRGYTELSFV

SEQ ID NO: 3003 - protein, 576 aa, Populus trichocarpa
MTDGNSKKSKLSWSKKMVRKWFNIKSKNEDFQADNIYGGGEVEYRTSFSEREPCTIKKSKTEKFSKNPEQFRRRRMNLDHPRIIDVQNHSIFVASWNVAGRSPPSNLSLDDWLHASPPADIYVLGFQEIVPLNAGNVLGAEDNGPAKKWLALIRKTLNNLPGTSGSGGCYTPSPIPEPIVEIDADFEGSSRQKNASFFHRRSFQTTHSWRMDNDPSIPQPRLDRRFSVCDQVIFGHRASDYDPSNRWGNRSSDYSRPSDYSRPSDYSRWSSLDDDNGPGESPSTVLYSPGSYSASTEDGHGRPGHSRYCLVASKQMVGIFLTIWVKSELRDHVKNMKVSCVGRGLMGYLGNKGSISVSMSLHQTSFCFICSHLTSGQKEGDELRRNVDVMEILKKTRFPRVNNAGDEKSPETILEHDRVIWLGDLNYRIALSYRAAKALVEMQNWRALLENDQLRIEQRRGRVFVGWNEGKIYFPPTYKYSTNSDRYAGDDMHPKDKRRTPAWCDRILWFGEGLHQLSYVRGESRFSDHRPVYGIFSAEVESSHDQLRKSTSYSSSRIEVEELFPYSHGYTELNFF

SEQ ID NO: 3004 - protein, 567 aa, Vitis vinifera
MRDGSSKKSKLSWSKTLVRKWFNIKSKTEEFQADEVVCGGGDVEWRTSFSEREPCTIKKSKTEKISKSAERVRQSRIDLDHPRVIDVQNYSIFVTTWNVGGKSPPSNLNLDDWLHASPPADIYVLGFQEIVPLNAGNVLGAEDNGPARKWLSLIRNTLNNLPGTSGSGGCYTPSPIPEPIVELDADFEGSARQKASSFFHRRSFQTTRSWRMDNDPSMTQPRLDRRFSVCDRVIFGHRPSDFDPNFRWGHRPSDYSRWGSSDDDNGPGDSPSTVLFSPISCGGSAPVEEGYRMPGNSRYCLVASKQMVGIFLTVWVRSELRDYVRNMKVSCVGRGLMGYLGNKGSISISMSLHQTSFCFVCSHLTSGQKEGDELRRNSDVMEILRKTRFPRVNDTGDEKSPETILEHDRIIWLGDLNYRIALSYRSAKALVEMQNWRALLENDQLRIEQRRGRVFEGWNEGKIYFPPTYKYSNNSDRYSGDDMHPKEKRRTPAWCDRILWYGGGLHQLSYVRGESRFSDHRPVYSIFWAEVESINSRLKKSTSYSSSRIDVEDFLPYSHGYTELSFF

SEQ ID NO: 3005 - protein, 622 aa, Medicago truncatula
MRDENTKKSKLSWSKKMVRKFFNIKCKTEDTTQQRDGFASGGGGLEYRSRSSLSEREPSTIKKSKTEKFSRNSSQVRRARMNLDHPRIIDVHNYSIFVGTWNVAGRSPPSNLSINDWLHASPPADIYVLGFQEIVPLNAGNILGAEDNGPAKKWLALIGNALNSLPGTSGGNGYYTPSPIPQPVVELNADFEGSARQKNSSFFHRRSFQTTSSSWGMDNDPSTVQPRLDRRFSVCDRVIFGNRKSDFDPSLRWGYRPSDYSRASDSRPSDYYTRPSDSRPSDYYSRASDYSRPSDYYSRASDYSRPSDYSRWGSSEDDNGLEDSPSTVLFSPMSYGGPAASGEDGYSMPGRSRYSLVASKQMVGIFLTVWVRGELKDHVKNMKVSCVGRGLMGYLGNKGSISISMSLHETSFCFICSHLTSGQKEGDELRRNSDVLEILKKTRFPRVHGSDSVKSPETILEHDRIIWLGDLNYRIALNYRSAKALIEMQNWRALLENDQLRIEQKRGRAFAGWKEGKIYFPPTYKYSTNSDRYAGDDMHPKEKRRTPAWCDRILWHGEGLRQISYVRGESRFSDHRPVYGLFWAEVESNHGKLKKSMSCSRSRIQVEELLPYSHGYTELNFF

SEQ ID NO: 3006 - protein, 588 aa, Fragaria vesca
VWYCLVKLSWSKKMVRKWFNIKSKTEDFQADDVVYGAEVEYRTSFSEREPCTIKKSKTEKFSKNTEQVRRRKMNLDHPRIIDVQNHSIFVATWNVAGRSPPSNLNMDEWLHASPPADIYVLGFQEIVPLNAGNVLGAEDNGPAKKWLALIRKTLNNLPGTSGGGGCYTPSPIPQPIVELHADFEGSARQKSSSFFQRRSFQATPSWRTENDPSASQPRLDRRFSVCDRVIFGHRPSDYDPNFRWGHRPSDYSRHSDYSGPSDYYSRPSDYSRPSDFSRWGSSDDDNGPGDSPSTVLFSPMSYAGSASNDNGYRMPGHSRYNLVASKQMVGIFLTVWVKSELRDHVKNMKVSCVGRGLMGYLGNKGSISVSMSLHDTTFCFICTHLTSGQKEGDELRRNSDVMEILRKTRFPKVNGSSALKNPETILEHDRVIWLGDLNYRISLSYRSAKALVEMQNWRALLERDQLRIEQKRGRAFVGWNEGKIYFPPTYKYSTNSDRYAGDDMHPKEKRRTPAWCDRILWYGEGLQQLSYVRGESRFSDHRPVYGIFWAEVESSHNKLKKSTSYSSSRIEVEELLPYSHGYTELNFF

SEQ ID NO: 3007 - protein, 415 aa, Zea mays
MPTTPRSRSQARTTRPWILSGMDFADSRRKPNFTGKIAVAAALTVMCIIVLKQSPSFSGTSVFSRHETGVTHVLVTGGAGYIGSHATLRLLSDKYRVTIVDNLSRGNMGAVRVLQRLFPEPGRLQFIYADLGDAKAVKKIFSENAFDAVMHFAAVAYVGESTMEPLRYYHNITSNTLTVLEAMAAYNVNTLIYSSTCATYGEPDTMPIVETTPQNPINPYGKAKKMAEDIILDFTKSKKQSDMAVMILRYFNVIGSDPEGRLGEAPRPELREHGRISGACFDAALGIIPGLKVRGTDYSTADGTCIRDYIDVTDLVDAHVKALGKAQPGKVGIYNVGTGQGRSVTEFVEACKKATGASIKVEYLARRPGDYAEVYSDPSKILRDLNWTAQYTDLGQSLAQAWKWQKAHPNGYASA

SEQ ID NO: 3008 - protein, 416 aa, Zea mays
MSTTPRSRSQGSRTTRPWILSGMDFAGSRRKPNLTGKIAVAAALTVMCIIVLKQSPSFSGTSVFSRHETGVTHVLVTGGAGYIGSHATLRLLSDKYRVTIVDNLSRGNIGAVRVLQRLFPEPGRLQFIYADLGDAKAVNKIFSENAFDAVMHFAAVAYVGESTMEPLRYYHNITSNTLTVLEAMAAHNVNTLIYSSTCATYGEPDTMPIVETTPQNPINPYGKAKKMAEDIILDFTKSKKQSNMAVMILRYFNVIGSDPEGRLGEAPRPELREHGRISGACFDAALGIIPGLKVRGTDYSTADGTCVRDYIDVTDLVDAHVKALGKAQPGKVGIYNVGTGQGRSVTEFVEACKKATGASIKVEYLARRPGDYAEVYSDPSKIHMELNWTAQYTDLGQSLAQAWKWQKAHPNGYGPA

SEQ ID NO: 3009 - protein, 414 aa, Echinochloa colona
MPTTPRSRSQARTTRPWILSGMDFADSRRKPNFTGKIAVAAALTVMCIIVLKQSPSFSGTSVFSRHEIGVTHVLVTGGAGYIGSHATLRLLKDNYRVTIVDNLSRGNMGAVRVLQRLFPQPGRLQFIYADLGDAKAVNKIFSENAFDAVMHFAAVAYVGESTMEPLRYYHNITSNTLTVLEAMAAHNVNTLIYSSTCATYGEPDTMPIVETTPQNPINPYGKAKKMAEDIILDFTKSKKSNMAVMILRYFNVIGSDPEGRLGEAPRPELREHGRISGACFDAALGTIPGLKVHGTNYPTADGTCIRDYIDVTDLVDAHVKALDKAQLGKVGIYNVGTGKGRSVKEFVEACKKATGASIKVSYLKRRPGDYAEVYSDPSKIHNELNWTAQYTDLGQSLSQAWKWQKAHPNGYGSA

SEQ ID NO: 3010 - protein, 414 aa, Echinochloa colona
MPTTPRSRSQARTTRPWILSGMDFADSRRKPNFTGKIAVAAALTVMCIIVLKQSPSFSGTSVFSRHEIGVTHVLVTGGAGYIGSHATLRLLKDNYRVTIVDNLSRGNMGAVRVLQRLFPQPGRLQFIYADLGDAKAVNKIFSENAFDAVMHFAAVAYVGESTMEPLRYYHNITSNTLTVLEAMAAHNVNTLIYSSTCATYGEPDTMPIVETTPQNPINPYGKAKKMAEDIILDFTKSKKSNMAVMILRYFNVIGSDPEGRLGEAPRPELREHGRISGACFDAALGTIPGLKVHGTNYPTADGTCIRDYIDVTDLVDAHVKALDKAQLGKVGIYNVGTGKGRSVKEFVEACKEATGASIKVSYLKRRPGDYAEVYSDPSKIHNELNWTAQYTDLGQSLSQAWKWQKAHPNGYGSA

SEQ ID NO: 3011 - protein, 414 aa, Panicum virgatum
MPTTPRSRSQARTTRPWILPGMDFADSRRKPNFTGKIAVAAALTVMCIIVLKQSPGFSGTNVFSRHEIGVTHVLVTGGAGYIGSHATLRLLKDNYRVTIVDNLSRGNMGAVRVLQRLFPQPGRLQFIYADLGDAKAVNKLFSENAFDAVMHFAAVAYVGESTMEPLRYYHNITSNTLTVLEAMAAHNVNTLIYSSTCATYGEPDTMPIVETTPQNPINPYGKAKKMAEDIILDFTKSKKSNMAVMILRYFNVIGSDPEGRLGEAPRPELREHGRISGACFDAALGIISGLKIRGTDYPTTDGTCIRDYIDVTDLVDAHVKALDKAQPGKVGIYNVGTGQGRSVKEFVEACKTATGASIKVEYLTRRPGDYAEVYSDPSKIHRELNWTAQYTDLGQSLAQAWKWQKAHPNGYGSA

SEQ ID NO: 3012 - protein, 414 aa, Echinochloa colona
MPTTPRSRSQARTTRPWILSGMDFADSRRKPNFTGKIAVAAALTVMCIIVLKQSPSFSGTSVFSRHEIGVTHVLVTGGAGYIGSHATLRLLKDNYRVTIVDNLSRGNMGAVRVLQRLFPQPGRLQFIYADLGDAKAVNKIFSENAFDAVMHFAAVAYVGESTMEPLRYYHNITSNTLTVLEAMAAHNVNTLIYSSTCATYGEPDTMPIVETTPQNPINPYGKAKKMAEDIILDFTKSKKSNMAVMILRYFNVIGSDPEGRLGEAPRPELREHGRISGACFDAALGTIPGLKVHGTNYPTADGTCIRDYIDVTDLVDAHVKALDKAQLGKVGIYNVGTGKGRSVKEFVEACKEATGASIKVSYLKRRPGDYAKVYSDPSKIHNELNWTAQYTDLGQSLSQAWKWQKAHPNGYGSA

SEQ ID NO: 3013 - protein, 414 aa, Panicum virgatum
MPTTPRSRSQARTTRPWILPGMDFADSRRKPNFTGKIAVAAALTVMCIIVLKQSPGFSGTNVFSRHEVGVTHVLVTGGAGYIGSHATLRLLKDNYRVTIVDNLSRGNMGAVRVLQRLFPQPGRLQFIYDDLGDAKAVNKLFSENAFDAVMHFAAVAYVGESTMEPLRYYHNITSNTLTVLEAMAAHNVNTLIYSSTCATYGEPDTMPIVETTPQNPINPYGKAKKMAEDIILDFTKSKKSNMAVMILRYFNVIGSDPEGRLGEAPRPELREHGRISGACFDAALGIISGLKIRGTDYPTTDGTCIRDYIDVTDLVDAHVKALDKAEPGKVGIYNVGTGQGRSVKEFVEACKKATGASIKVDYLARRPGDYAEVYSDPSKIHRELNWTAQYTDLGQSLTQAWKWQKAHPKGYGSA

SEQ ID NO: 3014 - protein, 414 aa, Setaria italica
MPATPRSRSQARTTRPWILPGMDFTDTRRKPNFTGKIAVAAALTVMCIIVLKQSPSFSGTSVFSRHEIGVTHVLVTGGAGYIGSHATLRLLKDNYRVTIVDNLSRGNMGAVRVLQRLFPQPGRLQFIYADLGDAKAVNKIFSENAFDAVMHFAAVAYVGESTIEPLRYYHNITSNTLTVLEAMAAHNVNTLIYSSTCATYGEPDTMPIVETTPQNPINPYGKAKKMAEDIILDFTKSKKSNMAVMILRYFNVIGSDPEGRLGEAPRPELREHGRISGACFAAALGIVPGLKVHGKDYPTTDGTCVRDYIDVTDLVDAHVKALDKAQPGKVGIYNVGTGQGRSVKEFVEACKMATGASIKVSYLNRRPGDYAEVYSDPSKIHRELNWTAQYTDLGQSLSQAWKWQKAHPNGYGSA

SEQ ID NO: 3015 - protein, 414 aa, Pennisetum glaucum
MPATPRSRSQARTTRPWILSGMDFADTRRKPNFTGKIAVAAALTVMCIIVLKQSPSFSGTSAFSRHEIGVTHVLVTGGAGYIGSHATLRLLKDNYRVTIVDNLSRGNMGAVRVLQRLFPQPGRLQFIYADLGDAKAVNKIFSENAFDAVMHFAAVAYVGESTMEPLRYYHNITSNTLTVLEAMAAHNVNTLIYSSTCATYGEPDTMPIVETTPQNPINPYGKAKKMAEDIILDFTKSKKSNMAVMILRYFNVIGSDPEGRLGEAPRPELREHGRISGACFAAALGIIPGLKVHGRDYTTADGTCVRDYIDVTDLVDAHVKALDKAQPGKVGIYNVGTGKGRSVTEFVEACKAATGASIKVSYLDRRPGDYAEVYSDPTKIRTELNWTAQYTDLGQSLSQAWKWQKAHPNGYGSV

SEQ ID NO: 3016 - protein, 412 aa, Hordeum vulgare
MPTTPRSRSQARTTRSWILSGMDFGDTRRKPNFAGKIAVAAALTVMCILVLKQSPGFGGTSVFSRHETGVTHVLVTGGAGYIGSHATLRLLTDNYRVTIVDNLSRGNMGAVRALQRLFPEPGRLQFIYTDLGDAKAVNKMFSENAFDAVMHFAAVAYVGESTQEPLRYYHNITSNTLTVLEAMAAHNVKTLIYSSTCATYGEPDTMPIVETTPQIPINPYGKAKKMSEDIILDFSKKSNMAVMILRYFNVIGSDPEGRLGEAPRPELREHGRISGACFDAASGIIPGLKVRGTDYPTADGTCVRDYIDVTDLVDAHVKALGKAEPNKVGIYNVGTGKGRSVKEFVEACKKATGVTIKVDYLDRRPGDYAEVYSNPSKIRDELNWTAQHTDLRESLATAWKWQKAHPGGYGSA

SEQ ID NO: 3017 - protein, 412 aa, Triticum aestivum
MPTTPRSRSQARTTRSWILSGMDFGDTRRKPNFAGKIAVAAALTVMCILVLKQSPGFGGTSVFSRHETGVTHVLVTGGAGYIGSHATLRLLTDNYRVTIVDNLSRGNMGAVRALQRLFPEPGRLQFIYTDLGDPKAVNKMFSENAFDAVMHFAAVAYVGESTQEPLRYYHNITSNTLTVLEAMAAHNVKTLIYSSTCATYGEPDTMPIVETTPQIPINPYGKAKKMSEDIILDFSKKSNMAVMILRYFNVIGSDPEGRLGEAPRPELREHGRISGACFDAASGIIPGLKVRGTDYPTADGTCVRDYIDVTDLVDAHVKALGKAEPNKVGIYNVGTGKGRSVKEFVEACKKATGATIKVDYLDRRPGDYAEVYSNPAKIRDELNWTAQHTDLRESLATAWKWQKAHPGGYGSA

SEQ ID NO: 3018 - protein, 412 aa, Aegilops tauschii
MPTTPRSRSQARTTRSWILSGMDFGDTRRKPNFAGKIAVAAALTVMCILVLKQSPGFGGTSVFSRHETGVTHVLVTGGAGYIGSHATLRLLTDNYRVTIVDNLSRGNMGAVRALQRLFPEPGRLQFIYTDLGDPKAVNKMFSENAFDAVMHFAAVAYVGESTQEPLRYYHNITSNTLTVLEAMAAHNVKTLIYSSTCATYGEPDTMPIVETTPQIPINPYGKAKKMSEDIILDFSKKSNMAVMILRYFNVIGSDPEGRLGEAPRPELREHGRISGACFDAASGIIPGLKVRGTDYPTADGTCVRDYIDVTDLVDAHVKALGKAEPSKVGIYNVGTGKGRSVKEFVEACKKATGATIKVDYLDRRAGDYAEVYSNPAKIRDELNWTAQHTDLRESLATAWKWQKAHPGGYGSA

SEQ ID NO: 3019 - protein, 412 aa, Avena sativa
MPTTPRTRSQARTTRSWILSGMDFGDMRRKPNFAGKIAVAAALTVMCILVLKQSPGFGGTSVFSRHETGVTHVLVTGGAGYIGSHATLRLLRDNYRVTIVDNLSRGNMGAVRVLQRLFPEPGRLQFIYTDLGDPKAVNKMFSENAFDAVMHFAAVAYVGESTQEPLRYYHNITSNTLTVLEAMAAHNVKTLIYSSTCATYGEPDTMPITETTPQIPINPYGKAKKMSEDIILDFSKNSNMAVMILRYFNVIGSDPEGLLGEAPRPELREHGRISGACFDAASGIIPGLKVRGTDYPTADGTCIRDYIDVTDLVDAHVKALGKAVPSKVGIYNVGTGQGRSVNEFVEACKAATGATIKVEYLTRRPGDYAEVYSNPSKIRDELNWTAQRTDLRESLATAWKWQKTHPGGYGSA

SEQ ID NO: 3020 - protein, 412 aa, Secale cereale
MPTTPRGRSQARTTRSWILSGMDFGDTRRKPNFTGKIAVAAALTVMCILVLKQSPGFGSTSVFSRHEVGVTHVLVTGGAGYIGSHATLRLLADNYRVTIVDNLSRGNMGAVRALQRLFPEPGRLQFIYTDLGDPKAVNKMFSENAFDAVMHFAAVAYVGESTQEPLRYYHNITSNTLTVLEAMAAHNVKTLIYSSTCATYGEPDTMPIVETTPQIPINPYGKAKKMSEDIILDFSKKSNMAVMILRYFNVIGSDPEGRLGEAPRPELREHGRISGACFDAASGIIPGLKVRGTDYPTADGTCVRDYIDVTDLVDAHVKALGKAEPSKVGIYNVGTGKGRSVKEFVEACKKATGATIKVDYLDRRPGDYAEVYSNPAKIRDELNWTAQHTDLRESLATAWKWQKAHPGGYGSA

SEQ ID NO: 3021 - protein, 412 aa, Secale cereale
MPTTPRGRSQARTTRSWILSGMDFGDTRRKPNFTGKIAVAAALTVMCILVLKQSPGFGSTSVFSRHEVGVTHVLVTGGAGYIGSHATLRLLTDNYRVTIVDNLSRGNMGAVRALQRLFPEPGRLQFIYTDLGDPKAVNKMFSENAFDAVMHFAAVAYVGESTQEPLRYYHNITSNTLTVLEAMAAHNVKTLIYSSTCATYGEPDTMPIVETTPQIPINPYGKAKKMSEDIILDFSKKSNMAVMILRYFNVIGSDPEGRLGEAPRPELREHGRISGACFDAASGIIPGLKVRGTDYPTADGTCVRDYIDVIDLVDAHVKALGKAEPSKVGIYNVGTGKGRSVKEFVEACKKATGATIKVDYLDRRPGDYAEVYSNPAKIRDELNWTAQHTDLRESLATAWKWQKAHPGGYGSA

SEQ ID NO: 3022 - protein, 412 aa, Avena sativa
MPTTPRTRSQARTTRSWILSGMDFGDMRRKPNFAGKIAVAAALTVMCILVLKQSPGFGGTSVFSRHETGVAHVLVTGGAGYIGSHATLRLLRDNYRVTIVDNLSRGNMGAVRVLQRLFPEPGRLQFIYTDLGDPKAVNKMFSENAFDAVMHFAAVAYVGESTQEPLRYYHNITSNTLTVLEAMAAHNVKTLIYSSTCATYGEPDTMPITETTPQIPINPYGKAKRMSEDIILDFSKNSNMAVMILRYFNVIGSDPEGLLGEAPRPELREHGRISGACFDAASGIIPGLKVRGTDYPTADGTCIRDYIDVTDLVDAHVKALGKAVPSKVGIYNVGTGQGRSVNEFVEACKAATGATIKVEYLTRRPGDYAEVYSNPSKIRDELNWTAQRTDLRESLATAWKWQKTHPGGYGSA

SEQ ID NO: 3023 - protein, 412 aa, Festuca arundinacea
MPTTPRSRSQARTTRSWILSGMDFGDARRKPNFAGKVAVAVALTVMCILVLKQSPGFGGTSVFSRHETGVTHVLVTGGAGYIGSHATLRLLRDNYRVTIVDNLSRGNMGAVRVLQRLFPEPGRLQFIYTDLGDPKAVNKMFSENAFDAVMHFAAVAYVGESTQEPLRYYHNITSNTLTVLEAMAAHNVKTLIYSSTCATYGEPETMPITETTPQIPINPYGKAKKMSEDIILDFSKNSKMAVMILRYFNVIGSDPEGRLGEAPRPELREHGRISGACFDAASGTIPGLKVRGTDYTTPDGTCVRDYIDVTDLVDAHVKALGKAEPGKVGIYNVGTGQGRSVKEFVEACKAATGAPIKVEYLDRRPGDYAEVYSNPSKIRDELNWTAKRTDLRESLATAWKWQQTHPGGYGST

SEQ ID NO: 3024 - protein, 412 aa, Festuca arundinacea
MPTTPRSRSQARTTRSGILSGMDFGDARHKPNFTGKVAVGVALTAMCILVLKQAPSFGGTSVFSRHETGGTHVVVTGGAGYIGSHATLRLLRDNYRVTIVDNLSRGNMGAVRVLQRLFPEPGRLQFIYTDLGDPKAVNKMFSENAFDAVMHFAAVAYVGESTQEPLRYYHNITSNTLTVLEAMAAHNVKTLIYSSTCATYGEPETMPITETTPQIPINPYGKAKKMSEDIILDFSKNSKMAVMILRYFNVIGSDPEGRLGEAPRPELREHGRISGACFDAASGIIPGLKVRGTDYTTPDGTCIRDYIDVTDLVDAHVKALGKAEPGKVGIYNVGTGQGRSVKEFVEACKAATGAPIKVEYLDRRPGDYAEVYSNPSKIRDELNWTAKRTDLRESLATAWKWQKTHPGGYGAT

SEQ ID NO: 3025 - protein, 414 aa, Brachypodium distachyon
MPRIKLRDYQEPSLESTKPFWLIGGMDIARRKPNFVGKVAVAAALTVMCILVLKQSPGFGGTSVFSRHETGVTHVLVTGGAGYIGSHATLRLLTDNYRVTIVDNLSRGNMGAVRVLQRLFPEPGRLQFIYTDLGDPKAVNKMFSENAFDAVMHFAAVAYVGESTQEPLRYYHNITSNTLTVLEAMAAYNVKTLIYSSTCATYGEPDTMPITETTPQNPINPYGKAKKMSEDIILDFSKKSDMAVMILRYFNVIGSDPEGRLGEAPRPELREHGRISGACFDAASGTIPGLKVRGTDYPTADGTCIRDYIDVTDLVDAHVKALGKAEPKKVGIYNVGTGQGRSVHEFVEACKMATGATIKVELLSRRPGDYAEVYSDPSKIRDELNWTARHTDLRESLATAWKWQKTHPGGYGLT

SEQ ID NO: 3026 - protein, 391 aa, Oryza sativa
MDFGDSRRKPNVVGKFTVAVALTVMCIIVLKQSPGFTSTSVFSRHEIGVTHVLVTGGAGYIGSHATLRLLRDNYRVTIVDNLSRGNMGAVRVLQRLFPEPGRLQFIYADLGDAKAVNKIFSENAFDAVMHFAAVAYVGESTLEPLRYYHNITSNTLTVLEAMAAYNVKTLIYSSTCATYGEPDTMPITEATPQNPINPYGKAKKMAEDIILDFSKRSEMAVMILRYFNVIGSDPGGRLGEAPRPELREHGRISGACFDAALGIIPGLKVRGTDYPTADGTCIRDYIDVTDLVDAHVKALDKAQPGKVGIYNVGTGHGRSVKEFVEACKSATGASIKVSFLTRRPGDYAEVYSDPSKIHDELNWTARYIDLRESLSTAWKWQKAHPNGYGSA

SEQ ID NO: 3027 - protein, 412 aa, Citrullus lanatus
MLNFGRSRTQQRSTRSLSLGGMDYSDPKKKNNVVGKFILAATLTALCIIMLKQSPAFSAPSQFGLREPGVTHVLVTGGAGYIGSHATLRLLKDNYRVTIVDNLSRGNLGAVKVLQELFPEPGRLQFIYADLGDAKSVNKIFSENAFDAVMHFAAVAYVGESTVDPLKYYHNITSNTLTVIEAMAAHGVKKLIYSSTCATYGEPDKMPITEETPQVPINPYGKAKKMAEDIIKDFSKNSKMAVMILRYFNVIGSDPEGRLGEAPRPELREQGRISGACFDAARGIIPGLKVRGTDYPTHDGTCVRDYIDVTDLVDAHVKALAKAEAGKVGIYNVGTGKGRSVKEFVEACKKATGVTIKVDYLDRRPGDYAEVFSDPTKINKELNWTAQYTDLEESLKVAWRWQKSHLNGYGSS

SEQ ID NO: 3028 - protein, 406 aa, Oryza sativa
MIPLNRRASQTRGGMEYFDARRKPHNVGKVIAALVLTTLCIFILKQSPGFGGSSVFSRHEPGVTHVLVTGGAGYIGSHASLRLLKDNYRVTIVDNLSRGNMGAVKVLQELFPQPGRLQFIYADLGDQKTVNKIFAENAFDAVMHFAAVAYVGESTLEPLRYYHNITSNTLLILEAMASHGVKTLIYSSTCATYGEPEKMPIVETTRQLPINPYGKAKKMAEDIILDFTKGRKDMAVMILRYFNVIGSDPEGRLGEAPRPELREHGRISGACFDAALGIIPGLKVKGTDYPTTDGTCIRDYIDVTDLVDAHVKALNKAEPSKVGIYNVGTGRGRSVKEFVDACKKATGVNIKIEYLSRRPGDYAEVYSDPTKINTELNWTAQYTDLKESLSVAWRWQKSHPRGYGSN

SEQ ID NO: 3029 - protein, 407 aa, Sorghum bicolor
MIPLNRRASLPRAGMEYFDARRKPHNVGKIIAALVLTTVCIFVLKQSPGFGGNSVFSRHEPGVTHVLVTGGAGYIGSHAALRLLKDNYRVTIVDNLSRGNMGAVKVLQGLFPQPGRLQFIFADLGDQKSVNKIFAENAFDAVMHFAAVAYVGESTLEPLRYYHNITSNTLLILEAMASHGVKTLIYSSTCATYGEPEKMPITEATPQFPINPYGKAKKMAEDIILDFSKSKGADMAVMILRYFNVIGSDPEGRLGEAPRPELREHGRISGACFDAALGVIPGLKVKGTDYPTADGTCIRDYIDVTDLVDAHVKALNKAEPRKVGIYNVGTGRGRSVNEFVDACKKATGVNIKIEYLSRRPGDYAEVYSDPTKINKELNWTAQYTDLKESLSVAWRWQKSHPHGYGPN

SEQ ID NO: 3030 - protein, 407 aa, Panicum virgatum
MIPLNRRASLPRAGMEYFDARRKPHNVGKIIAALVLTALCIFVLKQSPSFGGNSVFSRHEPGVTHVLVTGGAGYIGSHASLRLLKDNYRVTIVDNLSRGNMGAVKALQKLFPQPGRLQFIFADLGDQKSVNKIFAENAFDAVMHFAAVAYVGESTLEPLRYYHNITSNTLLILEAMASHGVKTLIYSSTCATYGEPEKMPITEATPQFPINPYGKAKKMAEDIILDFSKSKGADMAVMILRYFNVIGSDPEGRLGEAPRPELREHGRISGACFDAALGVIPGLKVKGTDYPTADGTCIRDYIDVTDLVDAHVKALNKAEPRKVGIYNVGTGRGRSVREFVDACKKATGVDIKVEYLNRRPGDYAEVYSDPTKINKELNWTAQYTDLKESLSVAWRWQKSHPHGYGTN

SEQ ID NO: 3031 - protein, 558 aa, Cicer arietinum
MGSVSSEEVSDRCGSYSPSADISESESCSSFYVRRFDAEGASSSANLSPRPLAAHFNLPPAAQVMLPVIGGKDVVVWDHKRDLDLSEVEMMKERFAKLLLGEDMSGGGKGVCTALAISNAITNLSATVFGELWRLEPLAPQKKSMWRREMEWLLCVSDSIVELVPSVQQFPGGGTYEVMATHPRSDLYINLPALKKLDGMLLGMLDGFCDTQFWYVDRGIVLGDSKDCDEYGRPSVRQEEKWWLPSPKLPPNGLCEDDRKRLQQCRDCTNQILKAAMAINSSVLAEMEIPVVYIESLPRTGKACLGDIIYRYITADQFSSECLLDCLDLSSEHHTLDIANRIEAAIHVWRLKDHKKHKNSVKARRSWGGKVKSLVADGEKNHFLAQRAETLLQSLQHRFPGLPQTALDMAKIQYNRDVGQSILESYSRVMESLAFNIMARIDDVLYVDDTIKQCAAADSILFSRGGFSGLPIQKRMSPSPFSIQRTPYASPFATPTFCSSSPLSGSPCSPRRTHTVKRNAKGKDSKTEKLPSSDFEKVWSYTGSLSVRRVSGEAPERN

SEQ ID NO: 3032 - protein, 558 aa, Medicago truncatula
MGSVSSEDVSERCGSYSPSADISESESSSSFYGRRFDAEGASSSANLSPRQLAAHFNLPATAQVMLPVIGGKDVAVWDHKRDLDLTEVEMMKERFAKLLLGEDMSGGGKGVCTALAISNAITNLSATVFGELWRLEPLAPQKKAMWRREMEWLLCVSDSIVELVPSVQQFPGGGTYEVMATRPRSDLYINLPALKKLDGMLLSMLDGFCDTQFWYVDRGIVLGDSKDCDDYGRPSVRQEEKWWLPSPKLPPNGLCEDDRKRLQQCRDCTNQILKAAMAINSSVLAEMEIPAAYVESLPRNGKACLGDIIYRYITAGQFSSECLLDCLDLSSEHHTQDIANRIEAAIHVWRLKDYKKLKKSGKARRSWGGKVKSLVADGEKNHFLVQRAETLLQSLKRRFPGLPQTALDMAKIQYNKDVGQSILESYSRVMESLAFNIMARIDDVLYVDDTVKRSAAADSILFGRGGFGGLPIQKRMTPSPFSIQHTPYASPFATPSFCSSSPVSGSPCSPRRTHDVKRNAKGKDSKAGKLASTDYEKVWSYAGNLSARRNSGEAPERD

SEQ ID NO: 3033 - protein, 556 aa, Trifolium pratense
MGSVSSEEEVSERCGSYSLSADISESESCSSFCGRRFDAEGASSSANLSPRQLAAHFNLPTAAQVMLPVIGGKDVAVWDHKRDLDLSEVEMMKERFAKLLLGEDMSGGGKGVCTALAISNAITNLSATVFGELWRLEPLAPQKKAMWRREMDWLLCVSDSIVELVPSVQQFPGGGTYEVMATRPRSDLHINLPALKKLDGMLLSMLDGFCDTQFWYVDRGIVLGDSKDCDECDRPSVRQEEKWWLPSPKLPPNGLCEDDRKRLQQCRDCTNQILKAAMAINSSVLAEMEIPAAYVESLPRNGKACLGDIIYRYITATQFSSECLLDCLDLSSEHHTQDIANRIEAAIHVWRLKDNKKVKNSVKARRSWGGKVKNLVADGDKNHFLAQRAETLLQNLKHRFPGLPQTALDMAKIQYNKDVGQSILESYSRVMESLAFNIMARIDDVLYVDDAIKRCAAADSILFGRGGFGGRPIQKRMSPSPFSIQHTPYASPFGTASSSPASGSSCSPSRTHAVKRNSKGKDSKTGKFSPADFEKVWSYTGNLNVRRVSGEAPERN

SEQ ID NO: 3034 - protein, 223 aa, Cajanus cajan
MAATMTWKLSLLLSLLSVSSLENVGAVPPTCKRIECPSYDVIQVGNGYEIRRYNSPVWISNTPIQDISLVEATRTGFLRLFDYIQGKNNYKQKIEMTGPVISEVLPSDGPFCESSFVVSFYVPKENQANPPPAKGLQVQRWKTVYAAVRQFGGFVKDTDVGEEAAALKASIAGTKWGAAVEKSKSAGHASVYTVAQYNAPFEYDNRVNEIWFLFDIESGLQTM

SEQ ID NO: 3035 - protein, 312 aa, Panicum virgatum
MDAAVSNPSSIKRIALVTGGNKGIGLETCRQLATRGLKVVLTARNEARGLEAVEAIRRSSGAAAAAEVFFHQLDVTDPSSAARLADFVRGQFGRLDILINNAGISGVDRDPILFAKVKDQVEGMDVNQRVEWMTENSKETYEEAKQCMRTNYYGAKIVTEALLPLLQLSSSGRIVNVSSGFGLLRNFNSEELRKEFDDIDNLTEKRLEELLDLFLEDFKANLLEAHGWPTGGSSAYKVAKAALNAYTRILAKKYPTLRINCLTPGYVKTDICMHMGVLTLEEGARNPVKVALLPDDGPTGAYFDLNGEAPFV

SEQ ID NO: 3036 - protein, 526 aa, Hordeum vulgare
MPNSAFPRLAFSALASNTHSKPNPATLPPRPPPSSSAMAASSAPLSFSASASSLPARLRLAAPAASCAATTRRRRPMVVRAKIREIFMPALSSTMTEGKIVSWAAAEGDRVTKGDAVVVVESDKADMDVETFYDGIVAAVLVPAGESAPVGAPIALLAESEEDVALAVAQAQALSSGQGQPQQQAPALSDAADSPPPPAAAPVAAAPAAVAAGTKGVATPQAKKLAKQHRVDLANVTGTGQFGRITPADVEAFAGIQPKPKVAPAPAAAPVAAASSVRAVPQAAVLPPVPGATVVPFTAMQAAVSKNMVESLSVPAFRVGYPILTDKLDELYEKVKPKGVTMTVLLAKAAAMALAQHPVVNASCRDGTSFTYNSSINIAVAVSIDGGLITPVLEQADKASTSDLCLCDKCCLDIYLLSQKWKELVKKARAKQLQPNEYNSGTFTLSNLGMFGVDRFDAILPPGQGAIMAVGASKSTVVADKDGFFSVQNKMLVNVTADHRIVYGADLAAFLQTFAKIIEDPESLTL

SEQ ID NO: 3037 - protein, 276 aa, Brachypodium distachyon
MAQLPPKIPMPAHHHWPGGVADAHHHHHQVAWADEFAEFAAARRGAHRRSLSDSVAFVEVMAPGGAGDFDRLDDDQLMSMFPDEGHGGGGSTTAPGSENGTSSDSDGVKHRKDHPQYDDDEQQNDNEANPEEEPAPGRATPTSSTETIRDPKRVKRILANRQSAQRSRVRKLQYISELERCVTTLQNEVSVLSPRVAFLDQQRTILTVGNSHLKQRIAALAQDKIFKDAHQEALKEEIERLRQVYQQQNLRMSSAPASDHAHGGPPPVRAEKELIS

SEQ ID NO: 3038 - protein, 872 aa, Glycine max
MPQGNAAAAAALLDHGGDAGDAVMARWLQSAGLQHLASPLASTAIDHRLLPNLLMQGYGAQSTEEKQRLLKLMRNLNFNGESGSEPYTPTTQSLGVAGSDGFYSPEFRGEFGAGLLDLHAMDDTELLSEHVVSEPFEPSPFMPGDTRVFEDDFDPINSKLESGEADTDASISLPMNSTRENNVAKIKVVVRKRPLNKKELAKKEDDVVTVTGNAYLTVHEPKLKVDLTAYVEKHEFCFDAVLDEHVTNDEVYRSTVEPIIPTIFERTKATCFAYGQTGSGKTYTMQPLPLRAAEDLVRQLHQPVYRDQRFKLWLSYFEIYGGKLYDLLSDRKKLCMREDGRQQVCIVGLQEFEVCDVLIVKEFIEKGSAARSTGSTGANEESSRSHAILQLAVKKHSEVKASKRNNDGNEARSGKVVGKISFIDLAGSERGADTTDNDRQTRIEGAEINKSLLALKECIRALDNDQIHIPFRGSKLTEVLRDSFVGNSKTVMISCISPGAGSCEHTLNTLRYADRVKSLSKSGNPRKDQVPNAVPQTNNKEVSSTSSFPASAGAEDLNDQRQEKTMDMGRKFVEKENSLHSSAAAAVDKQPLSYSSNYLSNGGEEKGFPSASVDRERYEVKNSHGDSTSQKMNSYSQSDTDEKVQKVSPPRRKGYKDEKSERPANWMKKDANGSDLFTTSSKQQSTGNYGTVSKDEKSERPANWMKRDANGSDLVTTSSKQSTGSYSTLSKDEKSERPANWIKRDANGSDTFTTSSKQQSTGNYNNITTGSRLNETESSPDGNVSAVLEEEEALIAAHRKEIEDTMEIVREEMKLLAEVDQPGSLIDNYVTKLSFVLSRKAASLVGLQARLARFQHRLKEQEILSRKRVPRQ

SEQ ID NO: 3039 - protein, 874 aa, Glycine max
MPQGNAAAAAALLDHGGDAGDAVMARWLQSAGLQHLASPLASTAIDHRLLPNLLMQGYGAQSAEEKQRLLKLMRNLNFNGESGSEPYTPTAQSLGGVAGSDGFYSPEFRGDFGAGLLDLHAMDDTELLSEHVVSEPFEPSPFMRGDTRVFEDDFDPINSKLESGEADTDASISLPMNSTRENNVAKIKVVVRKRPLNKKELAKKEDDVVTVADNAYLTVHEPKLKVDLTAYVEKHEFCFDAVLDEHVTNDEVYRSTVEPIIPTIFERTKATCFAYGQTGSGKTYTMQPLPLRAAEDLVRQLHQPVYRNQRFKLWLSYFEIYGGKLYDLLSDRKKLCMREDGRQQVCIVGLQEFEVCDVQIVKEFIEKGSAARSTGSTGANEESSRSHAILQLAVKKHSEVKASKRNNDGNEARSGKVVGKISFIDLAGSERGADTTDNDRQTRIEGAEINKSLLALKECIRALDNDQIHIPFRGSKLTEVLRDSFVGNSKTVMISCISPGAGSCEHTLNTLRYADRVKSLSKSGNPRKDQVPNAVPQTNNKDVSSTSSFPASSGAEDFNDQRQEKTMDMGRKFVEKENSLHSSAAASVDKQPVSYSSNYLSNGRDEKGFPSASVDRERFEVKNSHGDSTSQKMNSYSQSDTDEKVQKVSPPRRKGYKDEKSERSANWMKKDANDSDLFTTSSKQQSTGNYSTLSKDEKSERPAKWMKRDATGADLITTSSKQQSTGSYSTLSKDEKSERPANWMKRDANGSDPFTTSSKQQSTGNYNNITTGSRINETESSPDGNVSAVLEEEEALIAAHRKEIEDTMEIVREEMKLLAEVDQPGSLIDNYVTKLNFVLSRKAASLVGLQARLARFQHRLKEQEILSRKRVPRQ

SEQ ID NO: 3040 - protein, 332 aa, Panicum virgatum
MGESSGSASFSVDVERISFGGKEHLVRTRCGSAVTVAVYGDEDKPALITYPDVGLNYLSCFQGLFFCPEAASLLLHNFCIYHINPQGHELGAAPIPSDVPVLSVDDLADQVADVLDFFSLGSVMCLGVTVGAYVLTLFATKYRERVIGLMLVSPLCKAPSWSEWLYNKVLLNLLYYYGTRGLFKEYLLQRYFSKLLDEKQGENIWRFLQSINERHDLTDSLRKLQCRTLIFVGENSEFHEDAIHMTTKLDRRHCALVEVQDCGSLVTEEQPYAMLMPMEYFLMGYGLYRPRPYELSGSPRSPLSPCCISPELLSPESMGVKLKPIKTRVTIN

SEQ ID NO: 3041 - protein, 347 aa, Setaria italica
MGDSSGSASVSVDVERISFGGKEHLVRTRCGSVTVAVYGDEDKPALITYPDVGLNYMSCFQGLFFCPEAATLLLHNFCIYHINPQGHELGAAPIPSDVPVPSVDDLADQVADVLDFFSLGSVMCLGVTAGAYVLTLFATKYQERVIGLMLVSPLCKAPSWSEWLYNKILLNLLYYYGTRGLVKECLLQRYFSKRVRGDAQYPESDVVQACKSLLDEKQGESIWRFLQSINERHNLTDSLRKLQCRTLIFVGENSAFHEDAIHMTAKLDRKYCALVEVQDCGSLVTEEQPYAMLMPMEYFLMGYGLYRPYQLSSSPRSPLSPCCISPELLSPESMGVKLKPIKTRVAI

SEQ ID NO: 3042 - protein, 421 aa, Gossypium raimondii
MKNLIVMNKSSVLVFLLVGLFVLCECEDEDQFLPVSPMVKKEQEALYSAIQGFVGNSWNGSDLYPDPCGWTPIQGVYCDLLDGYWHVTVLNIGLVFDNSLQCSPNAKFTHHLFELIHLRSLSFFHCFSSPRDNPIRIPSSNWERLSNSLESLEFRSNGGLIGTIPVSISYLKKLRSLVLLENGLIGDLPIELGNLVNLKQLVLAGNKFTGQIPPSLGGLTELLIMDLSRNNLTGTLMLTFGCNLTSLLKLDLSNNKLEGKIPEGIGRLKNATLLDLGRNKFSGGLIQSFQQLVSLKEMVISNNPLGGDLMGVEWGKLQNLEILDLSNMGLTGLVPESMAGMKKLRYLGLNDNSLTGNLSPKLASLPCLNALYINDNNLTGKLEFAEGFYKKMGRKFRAWNNSNLCYQPEMILSSSSSKPWS

SEQ ID NO: 3043 - protein, 421 aa, Gossypium raimondii
MKNLIVMNKSSVLVFLLVGLFVLCECEDEDQFLPVSPMVKKEQEALYSAIQGFVGNSWNGSDLYPDPCGWTPIQGVYCDLLDGYWHVTVLNIGLVFDNSLQCSPNAKFTHHLFELIHLRSLSFFHCFSSPRDNPIRIPSSNWERLSNSLESLEFRSNGGLIGTIPVSISYLKKLRSLVLLENGLIGDLPIELGNLVNLKQLVLAGNKFTGQIPPSLGGLTELLIMDLSRNNLTGTLMLTFGCNLTSLLKLDLSNNKLEGKIPEGIGRLKNATLLDLGRNKFSGGLIQSFQRLVSLKEMVISNNPLGGDLMGVEWGKLQNLEILDLSSMGLTGLVPESMAGMKKLRYLGLNDNSLTGNLSPKLASLPCLNALYVNDNNLTGKLEFAEGFYKKMGRKFRAWNNSNLCYQREMIPSSSSSKPWS

SEQ ID NO: 3044 - protein, 386 aa, Echinochloa colona
RKPNFTGKIAVAAALTVMCIIVLKQSPSFSGTSVFSRHEIGVTHVLVTGGAGYIGSHATLRLLKDNYRVTIVDNLSRGNMGAVRVLQRLFPQPGRLQFIYADLGDAKAVNKIFSENAFDAVMHFAAVAYVGESTMEPLRYYHNITSNTLTVLEAMAAHNVNTLIYSSTCATYGEPDTMPIVETTPQNPINPYGKAKKMAEDIILDFTKSKKSNMAVMILRYFNVIGSDPEGRLGEAPRPELREHGRISGACFDAALGTIPGLKVHGTNYPTADGTCIRDYIDVTDLVDAHVKALDKAQLGKVGIYNVGTGKGRSVKEFVEACKEATGASIKVSYLKRRPGDYAKVYSDPSKIHNELNWTAQYTDLGQSLSQAWKWQKAHPNGYGSA

SEQ ID NO: 3045 - protein, 350 aa, Saccharum officinarum
HETGVTHVLVTGGAGYIGSHATLRLLSDKYRVTIVDNLSRGNMGAVRVLQRLFPEPGRLQFIYADLGDAKAVNKIFSENAFDAVMHFAAVAYVGESTMEPLRYYHNITSNTLTVLEAMAAHNVNTLIYSSTCATYGEPDTMPIVETTPQNPINPYGKAKKMAEDIILDFTKSKKQSNMAVMILRYFNVIGSDPEGRLGEAPRPELREHGRISGACFDAALGIIPGLKVRGTDYPTADGTCIRDYIDVTDLVDAHVKALDKAQPGKVGIYNVGTGQGRSVNEFVKACMKATGASIKVEYLARRPGDYAEVYSDPSKIHRDLNWTAQYTDLGQSLSQAWKWQKAHPNGYGSA

SEQ ID NO: 3046 - protein, 412 aa, Ananas comosus
MLPVNRSRSQPRAGRSWPFSGMEFSDSRRKPHFLGKVITAVVLTALCIYILKQSPGFGGTSVFSRHDPGVTHVLVTGGAGYIGSHAALRLLKDSYRVTIVDNLSRGNMGAVKVLQELFPEPGRLQFIYADLGDAKAVNKIFAENAFDAVMHFAAVAYVGESTMEPLRYYHNITANTLTVLEAMAAHGVKTLIYSSTCATYGEPKKMPITEVTPQSPINPYGKAKKMAEDIILDFSKRSDMAVMILRYFNVIGSDPEGRLGEAPRPELREHGRISGACFDAALGVIPGLKVKGTDYPTADGTCIRDYIDVTDLVDAHVKALDKAEPKKVGIYNVGTGQGRSVKQFVEACKQATGAKIKVEYLSRRPGDYAEVYSDPAKINHELNWTARYTDLQESLSIAWRWQRSHPNGYGRS

SEQ ID NO: 3047 - protein, 411 aa, Daucus carota
MLNFNRSRSQARTNRSMSLGGMDFVDPKKKSSYVGKILLAASLTAFCILVLKQSPTFNTPSAFSRHEPGITHVLVTGGAGYIGSHAVLRLLKDSYRVTIVDNLSRGNLGAVKVLQGLFPEPNRLQFIYADLGDAKAVNKIFSENAFDAVMHFAAVAYVGESTLDPLRYYHNITSNTLVVLEAMAAHGVGTLIYSSTCATYGEPEKMPITEETPQVPINPYGKAKKMAEDIILDFHTNSNMAVMILRYFNVIGSDPEGRLGEAPRPELREHGRISGACFDAARGIIPGLKVRGTDYKTADGTCIRDYIDVTDLVDAHVKALEKAMPGKVGIYNVGTGRGRSVKEFVEACKKATGVTIKVDFLDRRPGDYAEVLADPTKILRELNWTAQYTNLQESLQVAWRWQKSHLNGYNS

SEQ ID NO: 3048 - protein, 349 aa, Panicum virgatum
MGESSGSASFSVDVERISFGGKEHLVRTRCGSVTVAVYGDEDKPALVTYPDVGLNYLSCFQGLFFCPEAASLLLHNFCIYHINPQGHELGAAPIPCDVPVLSVDDLADQVADVLDFFSLGSVMCLGVTAGAYVLTLFATKYRERVIGLMLVSPLCKAPSWSEWLYNKLLLNLLYYYGTRGLVKECLLQRYFNKKVRGDAQYPESDIVQACKNLLDEKQGENIWRFLQSINERHDLTDSLRKLQCRTLIFVGENSEFHEDAIHMTAKLDRRYCALVEVQDCGSLVTEEQPYAMLMPMEYFLMGYGLYRPYQLSGSPRSPLSPCCISPELLSPESMGVKLKPIKTRVAVDF

SEQ ID NO: 3049 - protein, 349 aa, Sorghum bicolor
MAESSGYGSVSVDVERISFGGKEHLVRTRCGSVTVAVYGDEDKPALVTYPDVGLNYMSCFQGLFFCPEAASLLLHNFCIYHINPQGHELGAAPISSDVPVPTVDDLADQVADVLDFFSLGSVMCLGVTAGAYVLTLFATKYRERVIGLMLVSPLCKAPSWSEWLYNKVLLNLLYYYGTQGLVKECLLQRYFSKKLRGDAQYPESDIVQACKSLLDEKQSENIWRFLHSINERHDLTNSLKKLQCRTLIFVGENSEFHEDAIHMTTKLDRRYCALVEVQDCGSLVTEEQPYAMLMPMEYFLMGYGLYRPYQLSSSPRSPLSPCCIPPELLSPESMGVKLKPIKTRVAINF

SEQ ID NO: 3050 - protein, 349 aa, Zea mays
MAESSGSGSVSVDVERISFGGKDHLVRTRCGSVTVAVYGDEDKPALITYPDVALNYLSCFQAFFFCPEVASLLLHNFCVYHINPQGHEMGAAPMSSDVPVPSVDDLADQVADVLDFFSLGSVMCLGVTAGAYVLTLFATKYRERVIGLMLVSPLCKSPSWSEWLYNKVLLNLLYYYGNQGLVKECLLQRYFSKKLRGDAQCPESDIVRASRSLLDDKQGENIWRFLHSINERHDLTDSLKKLQCRTLIFVGESSQFHEDAIHMATKLDRRYCALVEVQDCGSLVTEEQPHAMVMPMEYFLMGYGLYRPYQLSSSPRSPLSPCCISPELLSPESMGVKLKPIKTRVGISL

SEQ ID NO: 3051 - protein, 347 aa, Oryza sativa
MGDSSRSVSIDVERISFGGKEHRVRTRYGSVSVSVFGDEDKPALITYPDVALNYMSCFQGLFFCPEAASLLLHNFCIYHITPQGHELGAAPISSDVPVPSVDELVDQVADVLDFFGLGSVMCLGVTAGAYILTLFATKYRDRVIGLMLVSPLCKAPSWSEWLYNKVLLNLLYYYGSRGLVKECLLQRYFSTEVRGNGQDPESEIVQACRSLLHERQGSNVWRFLQAINERHDLTEALKKLQCRTLIFVGENSQFHDDAVHMTTKLDRRYCALVEVQACGSLVTEEQPHAMLIPMEYFLMGYGLYRPSQLDSSPRSTLNPFCISPELLSPESMGVKLKPIKTRISLKV

SEQ ID NO: 3052 - protein, 347 aa, Panicum virgatum
MGDSSGSVSIDVERIFFGGKEHRVRTRHGPLSVSVYGDEDKPALITYPDVALNHMSCFQGLFFCPEAASLLLHNFCVYHITPQGHELGAAPISSDVPVPSVDDLADQVADVLDFFSLGAVMCLGVTAGAYVLTLFATKYRERVLGLMLVSPLCKAPSWSEWLYNKVLLNLLYYYGTRGLVKESLLQRYFSMEVRGNGQDPESDIVQACRTLLDERQGANVWRFLQAINRRHDLTESLMKLQCRTLIFVGENSQFHADSVHMTTKLDRRYCALVEVQACGSLVTEEQPHAMLIPMEYFLMGYGLYRPPQQETSPRSTLNPFCISPELLSPESMGVKLKPIKTRISLNI

SEQ ID NO: 3053 - protein, 356 aa, Brachypodium distachyon
MGESSSSGSGSVSVDVERISFARKEHQVRTRWGSSVSVAVYGDQDKPALVTYPDVALNYMSCFQGLFLCPETASLLLHNFCIYHINPQGHELGAAPVHSDVPVPSVDDLADQVADVLDYFSLGSAMCLGVTAGAYVLTLFATKYHERVVGLMLVSPLCKAPSWSEWLYNKVLLNLLYYYGTRGLVKECLLQRYFSKEMRGSAQCPESYIVQACRTLLGERQGENVWRFLHSMNKRHDLTEALRKLRCRTLIFVGENSQFHEDAIHITTKLDRRYCALVEVQGCGSLVTEEQPQAMLMPMEYFLMGYGLRRPPSYQVVSNGSPRGPLSPCRISPELLSPESMGVKLKPIKTRISLDF

SEQ ID NO: 3054 - protein, 347 aa, Leymus cinereus x Leymus triticoides
MGDSSGSVSIDVERIYFGGKEHPVRTRYGSVSVSVYGDEDKPALITYPDVALNYMSCFQGLFFCPEAASLLLHNFCIYHITPQGHELGAAPIPSDVPELSVDNLADQVADVLDSFGFGSVMCMGVTAGAYVLTLFAPKYRERVLGLMLVSPLCKAPSWSEWLYNKVLLNLLYYCGTSGLVNECLLQRYFSTEVRGSGQEPESEIVQACRSLLDQRQGVNVCRFLKAINERHDLTEALKKLRCRTLIFVGENSQFHADAVHMTTKLDRRYCALVEVQACGSLVTEEQPHAMLIPMEYFLMGYGLYRPSQLESSPRSTLNPFCISPELLSPESMGVKLKPIKTRTSLNV

SEQ ID NO: 3055 - protein, 347 aa, Hordeum vulgare
MGDSSGSVSIDVERIYFGGKEHPVRTRYGPVSVSVYGDEDKPALITYPDVALNYMSCFQGLFFCPEAASLLLHNFCIYHITPQGHELGAAPIPSDVPELSVDNLADQVADVLDFFGLGSVMCMGVTAGAYVLTLFAAKYRERVLGLMLVSPLCKAPSWSEWLYNKVLLNLLYYCGTSGLVNECLLQRYFSTEVRGSGQEPESEIVQACRSLLDQRQGVNVCRFLKAINERHDITEALKKLRCRTLIFVGENSQFHADAVHMTTKLDRRYCALVEVQACGSLVTEEQPHAMLIPMEYFLMGYGLYRPSQLESSPRSTLNPFCISPELLSPESMGVKLKPIKTRTSLNV

SEQ ID NO: 3056 - protein, 347 aa, Secale cereale
MGDSSGSVSIDVERIYFGGKEHPVRTRYGPVSVSVYGDEDKPALITYPDVALNYMSCFQGLFFCPEAASLLLHNFCIYHITPQGHELGAAPIPSDVPELSVDNLADQVADVLDFFGLGSVMCMGVTAGAYVLTLFAAKYRERVLGLMLVSPLCKAPSWSEWLYNKVLLNLLYYCGTSGLVNECLLQRYFSTEVRGSGQEPESEIVQACRSLLDQRQGVNVCRFLKAINGRHDLTEALKKLRCRTLIFVGENSQFHADAVHMTTKLDRRYCALVEVQACGSLVTEEQPHAMLIPMEYFLMGYGMYRPSQLDSSPRSTLNPFCISPELLSPESMGVKLKPIKTRTSLNV

SEQ ID NO: 3057 - protein, 347 aa, Zea mays
MGDSSDSVSVDVERIFFGGKGHRVRTRHGPLSVSVYGDEDKPALVTYPDLALNHMSCFQGLFFCPEAASLLLHNFCVYHITPQGHELGAAPISADVHVPSVDDLADQVADVLDFFSLGSVMCLGVTAGAYVLTLFATKYRERVLGLMLVSPVCKAPSWSEWLYNKVLLNLLYYYGTRGIVKESLLQRYFSMDVLGNGQDPESEIVQACRSLLDDRQGTNVWRFLQAINRRHDLTESLEKLQCQTLIFVGENSQFHADAVHMTTKLDRRYCALVEVQACGSLVTEEQPHAMVIPMEYFLMGYGLYRPSQQESSPRSTLSPFCISPELLSPESMGVKLKPIKTRISRNV

SEQ ID NO: 3058 - protein, 347 aa, Triticum aestivum
MGDSSGSVSIDVERIYFGGKERPVRTRYGFVSVSVYGDEDKPALITYPDVALNYMSCFQGLFFCPEASSLLLHNFCIYHITPQGHELGAAPIPSDVPELSVDNLADQVADVLDFFGLGSVMCMGVTAGAYVLTLFAAKYRERVLGLMLVSPLCKAPSWSEWLYNKVLLNLLYYCGTSGLVNECFLQRYFSTEVRGSGQEPESEIVQACRSLLDQRQGVNVCRFLKAINERHDLTEALKKLRCRTLIFVGENSQFHADAVHMTTKLDRRYCALVEVQACGSLVTEEQPHAMLIPMEYFLMGYGMYRPSQLESSPRSTLNPFCISPELLSPESMGVKLKPIKTRASLIV

SEQ ID NO: 3059 - protein, 427 aa, Gossypium hirsutum
MKNLIVMNKSSVLVFLLVGLFVLCECEDEDQFLPVSPMVKKEQEALYSAIQGFVGNSWNGSDLYPDPCGWTPIQGVYCDLLDGYWHVTVLNIGLVFDNSLQCSPNAKFTHHLFELIHLRSLSFFHCFSSPRDNPIRIPSSNWERLSNSLESLEFRSNGGLIGTIPVSISYLKKLRSLVLLENGLIGDLPIELGNLVNLKQLVLAGNKFTGQIPPSLGGLTELLIMDLSRNSLTGTLMLTFGCNLTSLLKLDLSNNKLEGKIPEGIGRLKNATLLDLGRNKFSGGLIQSFQQLVSLKEMVISNNPLGGDLMGVEWGKLQNLEILDLSSMGLTGLVPESMAGMKKLRYLGLNDNSLTGNLSPKLASLPCLNALYVNDNNLTGKLEFAEGFYKKMGRKFRAWNNSNLCYQREMIPSSSSSSHGLNGVKLC

SEQ ID NO: 3060 - protein, 347 aa, Zea mays
MGDSSGSVSVDVERIFFGGKEHRVRTRHGSLSVSVYGDEDKPALVTYPDVALNHMSCFQGLFFCPEAASLLLHSFCVYHITPQGHELGAAPISADVPVPSVDDLADQVADVLDFFSLGSVMCLGVTAGAYVLTLFATKYRERVLGLMLVSPVCKAPSWSEWLYNKVLSNLLYYYGTRGLVKESLLQRYFSMDVRGNGQDPESEIVQACRSLLDERQGANVWRFLQAISRRHDLTESLKKLKCRTLIFVGENSQFHADAVHMTTKLDRRYCALVEVQACGSLVTEEQPHAMVIPMEYFLMGYGLYRPSQQESSPRSTLSPFCISPELLSPESMGVKLKPIKTRISLNV

SEQ ID NO: 3061 - DNA, 33 bp, Artificial Sequence
  Primer
aaaaagaattcaaagcaataagcatcctgactc

SEQ ID NO: 3062 - DNA, 33 bp, Artificial Sequence
  Primer
aaaaagaattcactgactctgattatgcgacac

SEQ ID NO: 3063 - DNA, 33 bp, Artificial Sequence
  Primer
aaaaagaattcagaattaagcactcggttgcag

SEQ ID NO: 3064 - DNA, 33 bp, Artificial Sequence
  Primer
aaaaagaattcagagtcaactcatgcaagacac

SEQ ID NO: 3065 - DNA, 34 bp, Artificial Sequence
  Primer
aaaaagaattcagcacaggttaaactgcacaatg

SEQ ID NO: 3066 - DNA, 33 bp, Artificial Sequence
  Primer
aaaaagaattcatagagctcccaccttctttgc

SEQ ID NO: 3067 - DNA, 33 bp, Artificial Sequence
  Primer
aaaaagaattcatgacatccggagattgacaac

SEQ ID NO: 3068 - DNA, 33 bp, Artificial Sequence
  Primer
aaaaagaattccctcgcttactatcctcatcac

SEQ ID NO: 3069 - DNA, 34 bp, Artificial Sequence
  Primer
aaaaagaattccgatcagtaagtaggtcagcagg

SEQ ID NO: 3070 - DNA, 32 bp, Artificial Sequence
  Primer
aaaaagaattccggttgcagaacagaacaaac

SEQ ID NO: 3071 - DNA, 36 bp, Artificial Sequence
  Primer
aaaaagaattcctaaaaccggacgaaaccattacac

SEQ ID NO: 3072 - DNA, 36 bp, Artificial Sequence
  Primer
aaaaagaattcctagcttctgaatgtggaaggacac

SEQ ID NO: 3073 - DNA, 32 bp, Artificial Sequence
  Primer
aaaaagaattcctgacagctcagtctgcactc

SEQ ID NO: 3074 - DNA, 33 bp, Artificial Sequence
  Primer
aaaaagaattcgaaatgggttgtccctatctcc

SEQ ID NO: 3075 - DNA, 33 bp, Artificial Sequence
  Primer
aaaaagaattcgacaccttaaagaatgaccacc

SEQ ID NO: 3076 - DNA, 30 bp, Artificial Sequence
  Primer
aaaaagaattcgacccgtccaccttcagac

SEQ ID NO: 3077 - DNA, 36 bp, Artificial Sequence
  Primer
aaaaagaattcgtacacatgcataagataatgccac

SEQ ID NO: 3078 - DNA, 34 bp, Artificial Sequence
  Primer
aaaaagaattcgtaccacatgctcatttcaacag

SEQ ID NO: 3079 - DNA, 35 bp, Artificial Sequence
  Primer
aaaaagaattctctaacacagttcgacacagcttc

SEQ ID NO: 3080 - DNA, 33 bp, Artificial Sequence
  Primer
aaaaagaattcttgactacttgttagctgctgg

SEQ ID NO: 3081 - DNA, 31 bp, Artificial Sequence
  Primer
aaaaggcctaaacagcaggaaagcaatatcc

SEQ ID NO: 3082 - DNA, 32 bp, Artificial Sequence
  Primer
aaaaggcctaacgtttgaaacaacaccttaac

SEQ ID NO: 3083 - DNA, 32 bp, Artificial Sequence
  Primer
aaaaggcctaactgttttctcctttgtgtttc

SEQ ID NO: 3084 - DNA, 31 bp, Artificial Sequence
  Primer
aaaaggcctaagcactaggattcgacaatgc

SEQ ID NO: 3085 - DNA, 31 bp, Artificial Sequence
  Primer
aaaaggcctaatatagccgaaccatgtgaag

SEQ ID NO: 3086 - DNA, 31 bp, Artificial Sequence
  Primer
aaaaggcctaccactaccggaactcagacac

SEQ ID NO: 3087 - DNA, 31 bp, Artificial Sequence
  Primer
aaaaggcctactggaaatgaactgacggttg

SEQ ID NO: 3088 - DNA, 31 bp, Artificial Sequence
  Primer
aaaaggcctagaatcaaagtcatttgtgctg

SEQ ID NO: 3089 - DNA, 30 bp, Artificial Sequence
  Primer
aaaaggcctagccctcgtcagatgataagc

SEQ ID NO: 3090 - DNA, 31 bp, Artificial Sequence
  Primer
aaaaggcctcattgggttccaattaaactgc

SEQ ID NO: 3091 - DNA, 31 bp, Artificial Sequence
  Primer
aaaaggcctccttggcagaatcgaaactaac

SEQ ID NO: 3092 - DNA, 31 bp, Artificial Sequence
  Primer
aaaaggcctggaaagtccgcatgttattcag

SEQ ID NO: 3093 - DNA, 33 bp, Artificial Sequence
  Primer
aaaaggcctggcaatataagcaagtataagctg

SEQ ID NO: 3094 - DNA, 31 bp, Artificial Sequence
  Primer
aaaaggcctggcaatggaacaatgataaagg

SEQ ID NO: 3095 - DNA, 31 bp, Artificial Sequence
  Primer
aaaaggcctggttcgagtttatttgaattgc

SEQ ID NO: 3096 - DNA, 31 bp, Artificial Sequence
  Primer
aaaaggccttacagttgtgccgaagaatcac

SEQ ID NO: 3097 - DNA, 31 bp, Artificial Sequence
  Primer
aaaaggcctttcagacaagcaccagtcaaag

SEQ ID NO: 3098 - DNA, 31 bp, Artificial Sequence
  Primer
aaacccgggaacaatggcgcagataagctac

SEQ ID NO: 3099 - DNA, 29 bp, Artificial Sequence
  Primer
aaacccgggctctccctccgtctcacaac

SEQ ID NO: 3100 - DNA, 31 bp, Artificial Sequence
  Primer
aaacccggggattacaccaaatttgcaatgg

SEQ ID NO: 3101 - DNA, 28 bp, Artificial Sequence
  Primer
aaagaattcgctagctgttgtgcattgc

SEQ ID NO: 3102 - DNA, 30 bp, Artificial Sequence
  Primer
aaagaattcgtagcggctagctagctgttg

SEQ ID NO: 3103 - DNA, 31 bp, Artificial Sequence
  Primer
aaaggatccaacccatcttccatttgttatc

SEQ ID NO: 3104 - DNA, 31 bp, Artificial Sequence
  Primer
aaaggatccacgatggaattggtacaaggtg

SEQ ID NO: 3105 - DNA, 30 bp, Artificial Sequence
  Primer
aaaggatccatcagcctcctgttgttgttg

SEQ ID NO: 3106 - DNA, 31 bp, Artificial Sequence
  Primer
aaaggatccattcttcttctgcaccaccatc

SEQ ID NO: 3107 - DNA, 31 bp, Artificial Sequence
  Primer
aaaggatcccaaatcggtcctcctcttcttc

SEQ ID NO: 3108 - DNA, 27 bp, Artificial Sequence
  Primer
aaaggatcccaccaccaccgtctcgtc

SEQ ID NO: 3109 - DNA, 34 bp, Artificial Sequence
  Primer
aaaggatcccactacactaaactgtcctctttgg

SEQ ID NO: 3110 - DNA, 31 bp, Artificial Sequence
  Primer
aaaggatccccgataacacagccatactgac

SEQ ID NO: 3111 - DNA, 30 bp, Artificial Sequence
  Primer
aaaggatcccctgtttgtattattgcctgc

SEQ ID NO: 3112 - DNA, 31 bp, Artificial Sequence
  Primer
aaaggatcccctttgctcagtagcgttatcc

SEQ ID NO: 3113 - DNA, 29 bp, Artificial Sequence
  Primer
aaaggatcccgactccagagctcacacag

SEQ ID NO: 3114 - DNA, 31 bp, Artificial Sequence
  Primer
aaaggatccctagctttgcttcccattactc

SEQ ID NO: 3115 - DNA, 31 bp, Artificial Sequence
  Primer
aaaggatccctcataaaccctaaaccgcctc

SEQ ID NO: 3116 - DNA, 28 bp, Artificial Sequence
  Primer
aaaggatccctctcatggcttccaaggc

SEQ ID NO: 3117 - DNA, 31 bp, Artificial Sequence
  Primer
aaaggatccctgtctctgtttcgattcgacc

SEQ ID NO: 3118 - DNA, 31 bp, Artificial Sequence
  Primer
aaaggatccgaagctcagttcacctcacctc

SEQ ID NO: 3119 - DNA, 31 bp, Artificial Sequence
  Primer
aaaggatccgcaaagagaatcggtgagagag

SEQ ID NO: 3120 - DNA, 31 bp, Artificial Sequence
  Primer
aaaggatccgcactctcactgttgaatttcc

SEQ ID NO: 3121 - DNA, 29 bp, Artificial Sequence
  Primer
aaaggatccgcgagatgacactgcagatg

SEQ ID NO: 3122 - DNA, 32 bp, Artificial Sequence
  Primer
aaaggatccgctattcattctgctccatttac

SEQ ID NO: 3123 - DNA, 28 bp, Artificial Sequence
  Primer
aaaggatccggcgactctggaaacgaag

SEQ ID NO: 3124 - DNA, 30 bp, Artificial Sequence
  Primer
aaaggatccgggaaagatcaagatggaggc

SEQ ID NO: 3125 - DNA, 31 bp, Artificial Sequence
  Primer
aaaggatcctaaaccctaaaccgcctcattc

SEQ ID NO: 3126 - DNA, 31 bp, Artificial Sequence
  Primer
aaaggatcctacttctctgctggtttgattg

SEQ ID NO: 3127 - DNA, 34 bp, Artificial Sequence
  Primer
aaaggatcctcacccatttctccctcttatttac

SEQ ID NO: 3128 - DNA, 31 bp, Artificial Sequence
  Primer
aaaggatcctcgatctctttcccactctgtc

SEQ ID NO: 3129 - DNA, 32 bp, Artificial Sequence
  Primer
aaaggatcctgctccatttacaatacaatgtg

SEQ ID NO: 3130 - DNA, 31 bp, Artificial Sequence
  Primer
aaaggatcctggcttgttgtaacttgacttg

SEQ ID NO: 3131 - DNA, 33 bp, Artificial Sequence
  Primer
aaaggatcctgtggacattagccatacaatttc

SEQ ID NO: 3132 - DNA, 28 bp, Artificial Sequence
  Primer
aaaggatccttcacaccaccaccgtctc

SEQ ID NO: 3133 - DNA, 32 bp, Artificial Sequence
  Primer
aaaggtacccgtgaatggaagttcaagaattg

SEQ ID NO: 3134 - DNA, 31 bp, Artificial Sequence
  Primer
aaaggtaccttctcgtgaatggaagttcaag

SEQ ID NO: 3135 - DNA, 29 bp, Artificial Sequence
  Primer
aaagtcgacaaaccctcatcatcacgttc

SEQ ID NO: 3136 - DNA, 31 bp, Artificial Sequence
  Primer
aaagtcgacacaccataaccttctctcatcc

SEQ ID NO: 3137 - DNA, 31 bp, Artificial Sequence
  Primer
aaagtcgacagagagtcctttccttagcgag

SEQ ID NO: 3138 - DNA, 31 bp, Artificial Sequence
  Primer
aaagtcgacatcagagagcttcaagagctgc

SEQ ID NO: 3139 - DNA, 30 bp, Artificial Sequence
  Primer
aaagtcgacatccgcactacctgcattctc

SEQ ID NO: 3140 - DNA, 31 bp, Artificial Sequence
  Primer
aaagtcgacctgcattctccgttcaattctc

SEQ ID NO: 3141 - DNA, 31 bp, Artificial Sequence
  Primer
aaagtcgactgtggttatgagcagtaggaag

SEQ ID NO: 3142 - DNA, 31 bp, Artificial Sequence
  Primer
aaagtcgacttccacgcattaaagtgttgtc

SEQ ID NO: 3143 - DNA, 31 bp, Artificial Sequence
  Primer
aacaggcctattcacgttacacacattgacc

SEQ ID NO: 3144 - DNA, 30 bp, Artificial Sequence
  Primer
aacggatcctttcagttttcggatgaagat

SEQ ID NO: 3145 - DNA, 31 bp, Artificial Sequence
  Primer
aataggcctggggaatcaaagtaactcacac

SEQ ID NO: 3146 - DNA, 30 bp, Artificial Sequence
  Primer
tttaggcctcaagatgcaatgctacacacg

SEQ ID NO: 3147 - DNA, 35 bp, Artificial Sequence
  Primer
tttaggcctctatagctagttccggactttcttcc

SEQ ID NO: 3148 - DNA, 32 bp, Artificial Sequence
  Primer
tttaggcctctttcctaaaagatgatggctcc

SEQ ID NO: 3149 - DNA, 32 bp, Artificial Sequence
  Primer
tttaggccttcatcactgcaagcaatcacagt

SEQ ID NO: 3150 - DNA, 34 bp, Artificial Sequence
  Primer
tttaggcctttatgttcttccttcctttcacagc

SEQ ID NO: 3151 - DNA, 32 bp, Artificial Sequence
  Primer
tttaggcctttattaagaccatggctttgatg

SEQ ID NO: 3152 - DNA, 26 bp, Artificial Sequence
  Primer
tttgaattcagcgagctctgcaatgg

SEQ ID NO: 3153 - DNA, 28 bp, Artificial Sequence
  Primer
tttgaattccgaccagcttgtggctatc

SEQ ID NO: 3154 - DNA, 31 bp, Artificial Sequence
  Primer
tttgaattctcatcagatagcgacccgagtc

SEQ ID NO: 3155 - DNA, 31 bp, Artificial Sequence
  Primer
tttgaattctcatcagtacagccggagcatg

SEQ ID NO: 3156 - DNA, 28 bp, Artificial Sequence
  Primer
tttggatccggaaacgaagcagcaatgg
